(19) United States
(12) Patent Application Publication
(10) Pub. No.: US 2024/0376492 A1
(43) Pub. Date: Nov. 14, 2024

(54) FULLY SYNTHETIC, LONG-CHAIN NUCLEIC ACID FOR VACCINE PRODUCTION TO PROTECT AGAINST CORONAVIRUSES

(71) Applicant: ROCKETVAX AG, Basel (CH)

(72) Inventor: Matthias CHRISTEN, Reinach (CH)

(73) Assignee: ROCKETVAX AG, Basel (CH)

(21) Appl. No.: 17/909,145

(22) PCT Filed: Mar. 3, 2021
(86) PCT No.: PCT/EP2021/055401

§ 371 Date: Sep. 2, 2022

(30) Foreign Application Priority Data
Mar. 3, 2020 (EP) 20020092.1
May 20, 2020 (EP) 20020240.6

(51) Int. Cl. C12N 15/86; A61K 39/00; C07K 14/005

(52) U.S. Cl. CPC C12N 15/86; C07K 14/005; A61K 39/00; A61K 2039/53; C12N 2770/20022; C12N 2770/20034; C12N 2770/20051

(57) ABSTRACT

This invention describes a fully synthetic, long-chain nucleic acid that can be used in biotechnological manufacturing processes to produce envelope proteins, virus envelopes and fragments of virus envelopes of SARS-CoV-2 and related coronaviruses in highly purified form, which, as a vaccine protect against COVID-19 and other viral diseases

[0001] The present invention relates to a fully synthetic, long-chain nucleic acid according to the independent claim 1. The invention further relates to a kit comprising two or more of these nucleic acids and a biotechnological production unit comprising at least one plasmid comprising the nucleic acid. The invention further relates to a virus envelope, a fragment of a virus envelope and/or a virus envelope protein obtainable by gene expression using said nucleic acid. Furthermore, the invention concerns a vaccine comprising products obtainable by gene expression using the nucleic acid, in particular a vaccine against the coronavirus SARS-CoV-2, as well as a method for producing the vaccine.

[0002] The rapid development and availability of vaccines is crucial in combating many viruses and bacteria. The production of suitable vaccines is a multi-stage, complex process and is not always successful despite often high investments. Typically, the development of a suitable vaccine takes years. These long development times consist of a major problem, especially with regard to new emerging pathogens, or mutated pathogens, as from an epidemiological point of view it is only possible to react too late, if at all, to the emergence of new diseases. In contrast, the analysis, identification and further detection of new or heavily mutated pathogens are now possible within weeks or even days, which is a huge improvement over the last century.

[0003] In this context, viruses are of special interest, as they harbor high mutation rates causing the spread from other species to humans. Rapid spreading of these viruses makes them a major challenge for modern medicine. The usual time today (2020) between the detection/identification of a newly emerging virus and the development of a vaccine is typically years. In a few cases, with sufficient prior knowledge, experimental vaccines could be provided within months. However, this time span is much longer than the typical time until thousands or millions of people are infected.

[0004] Such rapid spread is also a direct consequence of the high mobility of today's society.

[0005] Ideally, immediately after the identification of a new virus, a vaccine would be available in sufficient quantity and of the highest quality and would allow for a nationwide vaccination of all persons who have somehow come close to the initial outbreak site of the new virus. Furthermore, an ideal method for such a vaccine would be capable of reacting to the evolution and adaptation of the virus. Such an ideal production possibility seems utopian to the person skilled in the art today.

[0006] In the recent past in particular, the corona pandemic has dramatically increased the relevance of developing suitable tools for vaccine production. There is unanimous agreement that the development of a vaccine against the coronavirus SARS-CoV-2 is the only proven means of containing the pandemic and the associated global crisis in the long term.

[0007] In this background, the task of the present invention is to provide an instrument which allows the production of a vaccine against the coronavirus SARS-CoV-2, in large quantities and of high quality.

[0008] The problem is solved by a fully synthetic, long-chain nucleic acid according to claim 1. Preferred embodiments of the invention are reflected in the embodiments and dependent claims.

[0009] Accordingly, the invention relates to, inter alia, the following embodiments:
[0010] 1. Fully synthetic, long-chain nucleic acid with at least 4,000 bases, characterised in that the nucleic acid
   [0011] comprises at least two of the four sequence parts A-D in any arrangement,
   [0012] wherein
      [0013] i) Sequence part A comprises
         [0014] a) a sequence as defined in SEQ. ID. 50 or a sequence having at least 98.5% sequence identity to the sequence as defined in SEQ. ID. 50; or
         [0015] b) a sequence as defined in SEQ. ID. 3 or a sequence having at least 90% sequence identity to the sequence as defined in SEQ. ID. 3;
      [0016] ii) Sequence part B comprises
         [0017] a) a sequence as defined in SEQ. ID. 48 or a sequence having at least 98.3% sequence identity to the sequence as defined in SEQ. ID. 48; or
         [0018] b) a sequence as defined in SEQ. ID. 7 or a sequence having at least 90% sequence identity to the sequence as defined in SEQ. ID. 7;
      [0019] iii) Sequence part C comprises
         [0020] a) a sequence as defined in SEQ. ID. 49 or a sequence having at least 97.2% sequence identity to the sequence as defined in SEQ. ID. 49; or
         [0021] b) a sequence as defined in SEQ. ID. 11 or a sequence having at least 90% sequence identity to the sequence as defined in SEQ. ID. 11;
      [0022] iv) Sequence part D comprises a sequence as defined in SEQ. ID. 17 or a sequence having at least 98.5% sequence identity to the sequence as defined in SEQ. ID. 17; or
   [0023] encompasses a ribonucleic acid sequence corresponding to the deoxyribonucleic acid sequence according to the sequence parts A-D.
[0024] 2. The nucleic acid according to embodiment 1, characterized in that it has at least 8′000 bases, preferably at least 20′000 bases, in a defined sequence.
[0025] 3. The nucleic acid according to one of the preceding embodiments, wherein the nucleic acid additionally comprises
   [0026] a) 1.) an ORF1ab sequence defined by the SEQ. ID. 51 or a sequence having at least 98.5% sequence identity to SEQ. ID. 51; or
      [0027] 2.) i) an ORF b sequence defined by the SEQ. ID. 59 or a sequence having at least 98.5% sequence identity to SEQ. ID. 59; and
         [0028] ii) a n ORF1a sequence defined by the SEQ. ID. 58 or a sequence having at least 98.6% sequence identity to SEQ. ID. 58;
   [0029] b) an ORF3a sequence defined by the SEQ. ID. 52 or a sequence having at least 99% sequence identity to SEQ. ID 52; and
   [0030] c) an ORF7a sequence defined by the SEQ. ID. 54 or a sequence having at least 99.5% sequence identity to SEQ. ID. 54;
[0031] 4. The nucleic acid according to embodiment 3, wherein the nucleic acid additionally comprises
   [0032] a) an ORF6 sequence defined by the SEQ. ID. 53 or a sequence having at least 94.1% sequence identity to SEQ. ID 53; and/or
   [0033] b) an ORF8 sequence defined by the SEQ. ID. 55 or a sequence having at least 99% sequence identity to SEQ. ID 55.
[0034] 5. The nucleic acid according to one of the preceding embodiments, characterized in that sequence parts A to C correspond to the sequence according to SEQ. ID. 19 or the corresponding ribonucleic acid sequence.
[0035] 6. The nucleic acid according to any of the preceding embodiments, characterized in that the nucleic acid comprises in any arrangement at least three of the four sequence parts A-D or at least three of four sequence parts with a ribonucleic acid sequence corresponding to the deoxyribonucleic acid sequence according to the sequence parts A-D.
[0036] 7. The nucleic acid according to any of the preceding embodiments, characterized in that the nucleic acid comprises in any arrangement the four sequence parts A-D or four sequence parts with a ribonucleic acid sequence corresponding to the deoxyribonucleic acid sequence according to the sequence parts A-D.
[0037] 8. The nucleic acid according to one of the preceding embodiments, characterized in that the nucleic acid additionally comprises at least one sequence consisting of
   [0038] SEQ. ID. 15
   [0039] SEQ. ID. 28
   [0040] SEQ. ID. 29 and
   [0041] SEQ. ID. 30
   [0042] or comprises one of the deoxyribonucleic acid sequences according to the sequence parts SEQ. ID. 15, SEQ. ID. 28, SEQ. ID. 29 and SEQ. ID. 30 or the corresponding ribonucleic acid sequence.
[0043] 9. The nucleic acid according to one of the preceding embodiments, characterized in that it has a maximum size of 1′000′000 bases, preferably a maximum size of 200′000 bases.
[0044] 10. A vector comprising the nucleic acid according to one of the preceding embodiments.
[0045] 11. The vector according to embodiment 10, wherein the vector comprises the sequences defined by the SEQ. ID. 46 and SEQ. ID. 47.
[0046] 12. The vector according to any one of the embodiments 10 to 11, wherein the vector is a plasmid vector.
[0047] 13. A kit comprising two or more nucleic acids according to one of embodiments 1 to 9.
[0048] 14. The kit according to embodiment 13, wherein the nucleic acids are present in at least one plasmid, preferably in two or more plasmids.
[0049] 15. A biotechnological production unit comprising at least one vector according to embodiments 10 to 12.
[0050] 16. A virus envelope, a fragment of a virus envelope and/or virus envelope protein obtainable by gene expression using at least one nucleic acid according to one of embodiments 1 to 9, using the vector according to one of embodiments 10 to 12, using the kit according to one of embodiments 13 or 14, or the biotechnological production unit according to embodiment 15, wherein the virus envelope, the fragment of a virus envelope and/or the virus envelope protein package the at least one nucleic acid according to one of embodiments 1 to 9.
[0051] 17. A vaccine against the coronavirus SARS-CoV-2 comprising at least one nucleic acid according to one of embodiments 1 to 9 and products obtainable by gene expression using at least one nucleic acid according to one of the embodiments 1 to 9, using the vector according to one of embodiments 10 to 12, using the kit according to one of the embodiments 13 or 14 in a production organism, in particular comprising the virus envelope, the fragment of a virus envelope and/or the virus envelope protein according to embodiment 16.
[0052] 18. The vaccine according to embodiment 17 comprising at least two molecularly precisely defined protein components selected from the group consisting of the protein components a, b1, b2, c1, c2, d1 or d2, wherein
   [0053] (i) the protein component a comprises
      [0054] a) the sequence according to SEQ. ID. 14 analogous to the S protein of SARS-CoV-2 or a sequence having at least 90% sequence identity to SEQ. ID. 14; or
      [0055] b) the sequence according to SEQ. ID. 18 analogous to the S protein of SARS-CoV-2 or sequence having at least 90% sequence identity to SEQ. ID.18;
   [0056] (ii) the protein component b1 comprises
      [0057] a) the sequence according to SEQ. ID. 6 analogous to the envelope protein E of SARS-CoV-2 or a sequence having at least 90% sequence identity to SEQ. ID.6; or
      [0058] b) the sequence according to SEQ. ID. 21 analogous to the envelope protein E of SARS-CoV-2 or a sequence having at least 90% sequence identity to SEQ. ID.21; and
      [0059] the protein component b2 comprises the sequence according to SEQ. ID. 8 analogous to the envelope protein E of MHV59A or an equivalent protein comprising a sequence having at least 90% sequence identity to SEQ. ID.8;
   [0060] (iii) the protein component c1 comprises
      [0061] a) the sequence according to SEQ. ID. 10 analogous to the envelope protein M of SARS-CoV-2 or a sequence having at least 90% sequence identity to SEQ. ID. 10; or
      [0062] b) the sequence according to SEQ. ID. 22 analogous to the membrane protein M of SARS-CoV-2 or a sequence having at least 90% sequence identity to SEQ. ID.22; and
      [0063] the protein component c2 comprises the sequence according to SEQ. ID. 12 analogous to membrane protein M of MHV59A or an equivalent protein comprising a sequence having at least 90% sequence identity to SEQ. ID. 12; and
   [0064] (iv) the protein component d1 comprises
      [0065] a) the sequence according to SEQ. ID. 2 analogous to the nucleocapsid phosphoprotein N of SARS-CoV-2 or a sequence having at least 90% sequence identity to SEQ. ID. 2; or
      [0066] b) the sequence according to SEQ. ID. 26 analogous to the nucleocapsid phosphoprotein N of SARS-CoV-2 or a sequence having at least 90% sequence identity to SEQ. ID. 26; and the protein component d2 the sequence according to SEQ. ID. 4 analogous to the nucleocapsid phosphoprotein N of MHV59A or an equivalent protein comprising a sequence having at least 90% sequence identity to SEQ. ID. 4.
[0067] 19. A method for the production of the vaccine a vaccine against the coronavirus SARS-CoV-2 comprising the successive steps of
   [0068] a) introducing the nucleotide acid sequence according to one of embodiments 1 to 9 into a biotechnological production unit, in particular a cell line,
   [0069] wherein, the nucleic acid-based mRNA coding for at least two of the protein components selected from the group consisting of the protein components a, b1, b2, c1, c2, d1 or d2 are prepared by translation;
   [0070] b) obtaining protein components from the biotechnological production unit in step a); and
   [0071] c) purifying the obtained protein components to obtain the vaccine against the coronavirus SARS-CoV-2.
[0072] 20. A method for the production of a vaccine against the coronavirus SARS-CoV-2 comprising the virus envelope, the fragment of a virus envelope and/or the virus envelope protein according to embodiment 16 comprising the successive steps of:
   [0073] a) introducing the nucleotide acid sequence according to one of embodiments 1 to 9 into a biotechnological production unit, wherein the biotechnological production unit comprises a nucleotide acid coding for at least one of the protein components selected from the group consisting of the protein components a, b1, c1, and d1.
   [0074] b) obtaining a fragment of a virus envelope and/or virus envelope protein from the biotechnological production unit in step a); and
   [0075] c) purifying the obtained protein components to obtain the vaccine against the coronavirus SARS-CoV-2 comprising the virus envelope, the fragment of a virus envelope and/or the virus envelope protein according to embodiment 16.
[0076] 21. A method for the production of a vaccine against the coronavirus SARS-CoV-2 comprising the successive steps of:
   [0077] a) introducing the vector according to one of embodiments 10 to 12 into an amplifying biotechnological production unit;
   [0078] b) amplifying the nucleotide acid according to one of embodiments 1 to 9 in the amplifying biotechnological production unit;
   [0079] c) obtaining the nucleotide acid amplified in step b);
   [0080] d) obtaining the vaccine against the coronavirus SARS-CoV-2 by using method according to embodiment 19 or 20.

[0081] The invention, therefore, relates to a fully synthetic, long-chain nucleic acid with at least 4,000 bases, characterised in that the nucleic acid comprises at least two of the four sequence parts A-D in any arrangement, wherein i) Sequence part A comprises a) a sequence as defined in SEQ. ID. 1 or a sequence having at least 98.5% sequence identity to the sequence as defined in SEQ. ID. 1; or b) a sequence as defined in SEQ. ID. 3 or a sequence having at least 90% sequence identity to the sequence as defined in SEQ. ID. 3; ii) Sequence part B comprises a) a sequence as defined in SEQ. ID. 5 or a sequence having at least 98.3% sequence identity to the sequence as defined in SEQ. ID. 5; or b) a sequence as defined in SEQ. ID. 7 or a sequence having at least 90% sequence identity to the sequence as defined in SEQ. ID. 7; iii) Sequence part C comprises a) a sequence as defined in SEQ. ID. 9 or a sequence having at least 97.2% sequence identity to the sequence as defined in SEQ. ID. 9; or b) a sequence as defined in SEQ. ID. 11 or a sequence having at least 90% sequence identity to the sequence as defined in SEQ. ID. 11; iv) Sequence part D comprises a sequence as defined in SEQ. ID. 13 or a sequence having at least 98.5% sequence identity to the sequence as defined in SEQ. ID. 13; or encompasses a ribonucleic acid sequence corresponding to the deoxyribonucleic acid sequence according to the sequence parts A-D.

[0082] The nucleic acid according to the invention allows to significantly accelerate the production of the mentioned vaccines and leads to well-defined vaccines which are very specific to a virus or a modification, especially to the coronavirus SARS-CoV-2.

[0083] As will be shown further below, specific sequence features, of the sequence parts comprised in the nucleic acid sequence, according to the invention, allow the nucleic acid to be produced fully synthetically and thus tailor-made. The nucleic acid, according to the invention, thus differs from the nucleic acid naturally present in coronaviruses, not only in that it is in certain embodiments DNA instead of RNA, but also in the sequence which, in contrast to the naturally occurring sequence, allows the fully synthetic production of the nucleic acid by means of chemical synthesis.

[0084] Ultimately, the nucleic acid according to the invention thus makes it possible to express protein components that are defined with molecular precision. When these protein components are administered as a vaccine, optimal immunization can thus be obtained in the vaccine recipient. At the same time, the risk of possible side effects, which is highly prevalent with imprecisely defined protein components, is greatly minimized. Also, the fact that the protein components can be produced using common expression systems used for protein expression means that vaccines can be made available in large quantities very quickly. This is of crucial importance for viruses such as the coronavirus SARS-Cov-2, whose spread has assumed the proportions of a pandemic and whose containment, therefore, requires widespread vaccine administration.

[0085] The following terms and concepts shall be used in the context of this invention:

[0086] The term “nucleic acid”, refers to either DNA, RNA, and any modifications thereof.

[0087] The nucleic acid may be single-stranded or double-stranded. Modifications include, but are not limited to, those which provide other chemical groups that incorporate additional charge, polarizability, hydrogen bonding, electrostatic interaction, and fluxionality to the nucleic acid ligand bases or the nucleic acid ligand as a whole.

[0088] Such modifications include, but are not limited to, 2′-position sugar modifications, 5-position pyrimidine modifications, 8-position purine modifications, modifications at exocyclic amines, substitution of 4-thiouridine, substitution of 5-bromo or 5-iodo-uracil; backbone modifications, methylations, unusual base-pairing combinations such as the isobases isocytidine and isoguanidine. Modifications can also include 3′ and 5′ modifications such as capping.

### Fully Synthetic.

[0089] From a chemical point of view, nucleic acids are very sophisticated molecules with repeating units, the so-called bases. The term “fully synthetic” in this context means that the nucleic acid according to the invention is produced by a series of chemical reaction steps using chemical reagents. Biochemical aids such as enzymes can also be used during individual late production steps, such as the joining of already longer oligomers. The latter can in turn optionally be synthetic. Fully synthetic nucleic acids have sequence features that enable the chemical production process and differ from naturally occurring nucleic acids in one or more of the following sequence features:
[0090] i) the absence of one or more enzymatic restriction sites, in particular, restriction sites for Type IIS restriction endonucleases, which are known to the person skilled in the art;
[0091] ii) the absence or reduced occurrence, compared to the corresponding naturally occurring nucleic acids, of repeating nucleic acid sequences with more than 9 consecutive units of the same base within the fully synthetic nucleic acid;
[0092] iii) the absence or reduced occurrence of repeating base-pair sequences with more than 12 bases compared to the corresponding naturally occurring nucleic acids;
[0093] iv) the absence or reduced occurrence, relative to the corresponding naturally occurring nucleic acids, of indirectly repeating base-pair segments consisting of more than 12 base units known to the person skilled in the art as reverse-complementary sequences therefor;
[0094] v) the absence or reduced occurrence, relative to the corresponding naturally occurring nucleic acids, of nucleic acid sequences with more than 9 consecutive repetitions of duplicate base units (dinucleotide repeats) known to the person skilled in the art; and
[0095] vi) the absence or reduced occurrence, relative to the corresponding naturally occurring nucleic acids, of nucleic acid sequences with more than five consecutive repetitions of triple base units (trinucleotide repeats) known to the person skilled in the art.

[0096] In some embodiments, fully synthetic nucleic acids are partly produced and/or comprise sequence features according to the methods described in Venetz, J. E., et al., 2019, Proceedings of the National Academy of Sciences, 116(16), 8070-8079 and/or the SI appendix thereof.

[0097] In some embodiments, fully synthetic nucleic acids comprise sequence features that enable the chemical production process and differ from naturally occurring nucleic acids in two or more of the above-mentioned sequence features, in particular of the above-mentioned sequence features i)-vi).

[0098] In some embodiments, fully synthetic nucleic acids comprise sequence features that enable the chemical production process and differ from naturally occurring nucleic acids in three or more of the above-mentioned sequence features, in particular of the above-mentioned sequence features i)-vi).

[0099] In some embodiments, fully synthetic nucleic acids comprise sequence features that enable the chemical production process and differ from naturally occurring nucleic acids in four or more of the above-mentioned sequence features, in particular of the above-mentioned sequence features i)-vi).

[0100] In some embodiments, fully synthetic nucleic acids comprise sequence features that enable the chemical production process and differ from naturally occurring nucleic acids in five or more of the above-mentioned sequence features, in particular of the above-mentioned sequence features i)-vi).

[0101] In some embodiments, fully synthetic nucleic acids comprise sequence features that enable the chemical production process and differ from naturally occurring nucleic acids in six of the above-mentioned sequence features, in particular of the above-mentioned sequence features i)-vi). Long-chain oligonucleotides have been commercially available for years in short fragments, typically producing pieces with 60, 100 or 200 bases. Massively longer oligonucleotides are not readily available because the syntheses used today have too high error rates to produce reasonable amounts of longer nucleic acids. Such fragments with less than 1000 bases are, therefore, called short-chain, while nucleic acids with 1000 bases or more are called long-chain. Long-chain nucleic acids with 1000 to 5000 bases can be produced today at considerable expense (e.g. by the companies Twist Bioscience, Life-technologies). Long-chain nucleic acids with more than 5000 bases are enormously complex but chemically well-defined molecules. Each of the molecules can be described completely in terms of classical organic chemistry by position, type and linkage with other parts of the molecule. Two identical long-chain nucleic acids are therefore, despite their size and despite the fact that they contain tens of thousands to millions of atoms, identical in that all components are identical and are identically linked.

[0102] An explanation of end groups, any residues of protective groups or other auxiliaries from the synthesis of nucleic acids. The above description refers to the type of base in the nucleic acid. The person skilled in the art is aware that the synthesis is carried out by means of various auxiliary agents which are cleaved off at the end. However, sometimes residues of such groups remain, or other parts of the molecule are derivatised before or after a synthesis step. Such groups are known to the person skilled in the art and include, among others, Poly-A tail, modified DNA bases, cleavable linkers from solid-phase synthesis, biochemical groups such as biotin or streptavidin and others.

[0103] Other possible modifications and modifications that are used in standard methods concern fluorescent markers. These modifications or residues thereof should not affect the above description, and a group of identical nucleic acids should be considered identical if all n bases at their positions per position and type base are identical for all bases. In other words, the nucleic acids of the invention also include nucleic acids with the above modifications or residues, provided they have the base sequences required by the invention.

[0104] According to a first aspect, the present invention thus concerns nucleic acids which have special properties. These special properties are comprised in the base sequence, i.e. the sequence, and are only obtained if the inventive nucleic acid has certain properties. These properties are directly parts of the specific molecule or the entire chemically comprehensive description of the specific molecule. However, for the sake of simplicity, the base sequence should be indicated within this description in the text, always making it clear that the specific molecule is meant. The base sequence is therefore only a pragmatic form of description and obviously better suited for a textual representation of the invention than a direct representation of the molecule, or its IUPAC name.

[0105] The inventive molecules acquire the special properties through the presence of specific sequences, analogous to a description of a group of classical chemical agents with one or more molecular parts, which in chemistry are typically abbreviated as “R” and can then be described in more detail by describing “R”. Thus, in the present invention, analogous to this usual procedure in organic chemistry, a group of sequences is described which are responsible for the special properties of the inventive long-chain fully synthetic nucleic acids.

[0106] The inventive nucleic acids are characterized by the fact that they comprise fully synthetic nucleic acids which code for at least two of the 4 types of proteins of envelope proteins coronaviruses.

[0107] The term “types of envelope proteins of coronaviruses”, as used herein, refers to group A, group B, group C, or group D proteins of a coronavirus. The term “group A” protein, as used herein, refers to the group of nucleocapsid protein (N—type) of coronavirus. The term “group B”, as used herein, refers to the group of envelope proteins (E—type) of coronaviruses. The term “group C” protein, as used herein, refers to the membrane protein (M—type) of coronavirus. The term “group D” protein, as used herein, refers to the glycosylated surface protein (S—type) of coronavirus.

[0108] In some embodiments, the nucleic acids described herein are characterized by the fact that they comprise nucleic acids which code for at least one group A protein and at least one group B protein. In some embodiments, the nucleic acids described herein are characterized by the fact that they comprise nucleic acids which code for at least one group A protein and at least one group C protein. In some embodiments, the nucleic acids described herein are characterized by the fact that they comprise nucleic acids which code for at least one group A protein and at least one group D protein. In some embodiments, the nucleic acids described herein are characterized by the fact that they comprise nucleic acids which code for at least one group B protein and at least one group C protein. In some embodiments, the nucleic acids described herein are characterized by the fact that they comprise nucleic acids which code for at least one group B protein and at least one group D protein. In some embodiments, the nucleic acids described herein are characterized by the fact that they comprise nucleic acids which code for at least one group C protein and at least one group D protein.

[0109] In some embodiments, the inventive nucleic acids are characterized by the fact that they
[0110] (a) comprise more than 4,000 bases in a well-defined sequence; and
[0111] (b) comprise at least 2 of 4 sequences of particular importance which are assigned to the 4 sequence groups A-D which code for the 4 types of envelope proteins of coronaviruses, wherein
   [0112] i) the first sequence group A encodes for envelope proteins of the nucleocapsid protein N of coronavirus,
   [0113] ii) the second sequence group B encodes for envelope proteins of the type envelope protein E of coronaviruses,
   [0114] iii) the third sequence group C encodes for envelope proteins of the membrane protein M type of coronavirus, and
   [0115] iv) the fourth sequence group D encodes for envelope proteins of the glycosylated surface protein S of coronavirus.

[0116] The sequence part A disclosed within this description comprises a sequence according to SEQ. ID. 1 or SEQ. ID. 3, coding for the corresponding protein sequences according to SEQ. ID. 2 or SEQ. ID. 4. In some embodiments, the sequence part A comprises the sequence defined by the SEQ. ID. 50 or sequence having at least 98.5%, at least 98.6%, at least 98.7%, at least 98.8%, at least 98.9%, at least 99%, at least 99.1%, at least 99.2%, at least 99.3%, at least 99.4%, at least 99.5%, at least 99.6%, at least 99.7%, at least 99.8%, or at least 99.9% sequence identity to SEQ. ID. 50.

[0117] In some embodiments, the sequence part A comprises a sequence having at least 90% sequence identity to SEQ. ID. 3.

[0118] In some embodiments, the sequence part A comprises a sequence coding for an amino acid sequence having at least 90%, having at least 91%, having at least 92%, having at least 93%, having at least 94%, having at least 95%, at least 96%, at least 97%, at least 98%, at least 99%, at least 99.1%, at least 99.2%, at least 99.3%, at least 99.4%, at least 99.5%, at least 99.6%, at least 99.7%, at least 99.8%, or at least 99.9% sequence identity to SEQ. ID. 2.

[0119] In some embodiments, the sequence part A comprises a sequence coding for an amino acid sequence having at least 90%, having at least 91%, having at least 92%, having at least 93%, having at least 94%, having at least 95%, at least 96%, at least 97%, at least 98%, at least 99%, at least 99.1%, at least 99.2%, at least 99.3%, at least 99.4%, at least 99.5%, at least 99.6%, at least 99.7%, at least 99.8%, or at least 99.9% sequence identity to SEQ. ID. 4.

[0120] In some embodiments, the sequence part A comprises a sequence coding for an amino acid sequence having at least 90%, having at least 91%, having at least 92%, having at least 93%, having at least 94%, having at least 95%, at least 96%, at least 97%, at least 98%, at least 99%, at least 99.1%, at least 99.2%, at least 99.3%, at least 99.4%, at least 99.5%, at least 99.6%, at least 99.7%, at least 99.8%, or at least 99.9% sequence identity to SEQ. ID. 2 and SEQ. ID. 4.

[0121] The sequence part B disclosed within this description comprises a sequence according to SEQ. ID. 5 or SEQ. ID. 7, coding for the corresponding protein sequences according to SEQ. ID. 6 or SEQ. ID. 8. In some embodiments, the sequence part B comprises the sequence defined by the SEQ. ID 48 or a sequence having at least 98.3%, at least 98.6%, at least 99.1%, or at least 99.5% sequence identity to SEQ. ID. 48.

[0122] In some embodiments, the sequence part B comprises a sequence having at least 90% sequence identity to SEQ. ID. 7.

[0123] In some embodiments, the sequence part B comprises a sequence coding for an amino acid sequence having at least 90%, having at least 91%, having at least 92%, having at least 93%, having at least 94%, having at least 95%, at least 96%, at least 97%, at least 98%, at least 99%, at least 99.1%, at least 99.2%, at least 99.3%, at least 99.4%, at least 99.5%, at least 99.6%, at least 99.7%, at least 99.8%, or at least 99.9% sequence identity to SEQ. ID. 6.

[0124] In some embodiments, the sequence part B comprises a sequence coding for an amino acid sequence having at least 90%, having at least 91%, having at least 92%, having at least 93%, having at least 94%, having at least 95%, at least 96%, at least 97%, at least 98%, at least 99%, at least 99.1%, at least 99.2%, at least 99.3%, at least 99.4%, at least 99.5%, at least 99.6%, at least 99.7%, at least 99.8%, or at least 99.9% sequence identity to SEQ. ID. 8.

[0125] In some embodiments, the sequence part B comprises a sequence coding for an amino acid sequence having at least 90%, having at least 91%, having at least 92%, having at least 93%, having at least 94%, having at least 95%, at least 96%, at least 97%, at least 98%, at least 99%, at least 99.1%, at least 99.2%, at least 99.3%, at least 99.4%, at least 99.5%, at least 99.6%, at least 99.7%, at least 99.8%, or at least 99.9% SEQ. ID. 6 and SEQ. ID. 8.

[0126] The sequence part C disclosed within this description comprises a sequence according to SEQ. ID. 9 or SEQ. ID. 11, coding for the corresponding protein sequences according to SEQ. ID. 10 or SEQ. ID. 12. In some embodiments, the sequence part C comprises the sequence defined by the SEQ. ID. 49 or a sequence having at least 97.2%, at least 97.4%, at least 97.6%, at least 97.8%, at least 98%, at least 98.2%, at least 98.4%, at least 98.6%, at least 98.8%, at least 99%, at least 99.2%, at least 99.4%, at least 99.6%, at least 99.8%, at sequence identity to SEQ. ID. 49.

[0127] In some embodiments, the sequence part C comprises a sequence having at least 90% sequence identity to SEQ. ID. 11.

[0128] In some embodiments, the sequence part B comprises a sequence coding for an amino acid sequence having at least 90%, having at least 91%, having at least 92%, having at least 93%, having at least 94%, having at least 95%, at least 96%, at least 97%, at least 98%, at least 99%, at least 99.1%, at least 99.2%, at least 99.3%, at least 99.4%, at least 99.5%, at least 99.6%, at least 99.7%, at least 99.8%, or at least 99.9% sequence identity to sequence identity to SEQ. ID. 12.

[0129] In some embodiments, the sequence part B comprises a sequence coding for an amino acid sequence having at least 90%, having at least 91%, having at least 92%, having at least 93%, having at least 94%, having at least 95%, at least 96%, at least 97%, at least 98%, at least 99%, at least 99.1%, at least 99.2%, at least 99.3%, at least 99.4%, at least 99.5%, at least 99.6%, at least 99.7%, at least 99.8%, or at least 99.9% sequence identity to SEQ. ID. 10.

[0130] In some embodiments, the sequence part B comprises a sequence coding for an amino acid sequence having at least 90%, having at least 91%, having at least 92%, having at least 93%, having at least 94%, having at least 95%, at least 96%, at least 97%, at least 98%, at least 99%, at least 99.1%, at least 99.2%, at least 99.3%, at least 99.4%, at least 99.5%, at least 99.6%, at least 99.7%, at least 99.8%, or at least 99.9% sequence identity to SEQ. ID. 10 and SEQ. ID. 12.

[0131] The sequence part D disclosed within this description comprises a sequence according to SEQ. ID. 13, coding for the corresponding protein sequence according to SEQ. ID. 14. In some embodiments, the sequence part D comprises the sequence defined by the SEQ. ID 17 or a sequence having at least 98.5%, at least 98.6%, at least 98.7%, at least 98.8%, at least 98.9%, at least 99%, at least 99.1%, at least 99.2%, at least 99.3%, at least 99.4%, at least 99.5%, at least 99.6%, at least 99.7%, at least 99.8%, or at least 99.9% sequence identity to SEQ. ID. 17.

[0132] In some embodiments, the sequence part B comprises a sequence coding for an amino acid sequence having at least 90%, having at least 91%, having at least 92%, having at least 93%, having at least 94%, having at least 95%, at least 96%, at least 97%, at least 98%, at least 99%, at least 99.1%, at least 99.2%, at least 99.3%, at least 99.4%, at least 99.5%, at least 99.6%, at least 99.7%, at least 99.8%, or at least 99.9% sequence identity to SEQ. ID. 14.

[0133] The term “percent (%) sequence identity” with respect to a reference sequence is defined as the percentage of nucleotides or amino acid residues in a candidate sequence that are identical with the nucleotides or amino acid residues in the reference sequence, after aligning the sequences and introducing gaps, if necessary, to achieve the maximum percent sequence identity, and not considering any conservative substitutions as part of the sequence identity. Alignment for purposes of determining percent amino acid sequence identity can be achieved in various ways that are within the skill in the art, for instance, using publicly available computer software such as BLAST, BLAST-2, ALIGN or Megalign (DNASTAR) software. Those skilled in the art can determine appropriate parameters for aligning sequences, including any algorithms needed to achieve maximal alignment over the full length of the sequences being compared.

[0134] In some embodiments, the nucleotide acid sequence of the invention is altered (e.g., to facilitate the production process of the nucleotide acid sequence or products thereof) without altering or by unsubstantially altering the properties of the protein products.

[0135] In some embodiments, the alterations of the nucleotide acid sequence of the invention include at least one alteration selected from the group of
[0136] 1) base substitutions insertions, or deletions relative to the reference sequence without altering or by unsubstantially altering the properties of the protein products;
[0137] 2) replacing codons with synonymous versions; and
[0138] 3) reduction of the number of hypothetical genetic elements present within protein-coding sequences such as (alternative) ORFs, predicted gene internal transcriptional start sites, and/or sequence motifs (predicted or cryptic) that fine-tune translation rates (e.g., ribosome stalling motifs).

[0139] Testing whether the genes of the altered nucleotide acid sequence of the invention remain functional will identify genes in which additional information beyond the amino acid code is necessary for proper functioning.

[0140] In some embodiments, the nucleotide acid sequence described herein is altered to improve the biological function of the encoded protein products.

[0141] Such a biological function includes but is not limited to stability enhancement, production facilitation (e.g., insertion of additional replication initiating sequences), replication limitation.

[0142] In some embodiments, the nucleotide acid sequence described herein is altered to encode at least one alternative protein of interest with a similar structure but alternative biological function, such as the function of a protein of a mutated virus.

[0143] The person skilled in the art can obtain such an altered nucleotide sequence by analyzing the sequence coding for at least one alternative protein of interest (e.g. the nucleotide acid sequence of a mutated virus) and implementing the relevant alterations (e.g. mutations) into the most similar nucleotide acid sequence described herein. In some embodiments, the nucleotide acid sequences the most similar nucleotide acid sequence described herein is a sequence defined by the SEQ. ID. 1, SEQ. ID. 3, SEQ. ID. 5, SEQ. ID. 7, SEQ. ID. 9, SEQ. ID. 11, SEQ. ID. 13, and/or SEQ. ID. 17.

[0144] In some embodiments, the nucleotide acid sequences the most similar nucleotide acid sequence described herein is a sequence defined by the SEQ. ID. 1, SEQ. ID. 5, SEQ. ID. 9, SEQ. ID. 13.

[0145] In some embodiments, the coronavirus described herein is SARS-CoV-2. In some embodiment the SARS-CoV-2 described herein is a SARS-CoV-2 variant selected from the group of Lineage B.1.1.207, Lineage B.1.1.7, Cluster 5, 501.V2 variant, Lineage P.1, Lineage B.1.429/CAL.20C, and Lineage B.1.525.

[0146] In some embodiments, the SARS-CoV-2 described herein is a SARS-CoV-2 variant described by a Nextstrain clade selected from the group 19A, 20A, 20C, 20G, 20H, 20B, 20D, 20F, 20I, and 20E.

[0147] In some embodiments, the sequence coding for at least one alternative protein of interest comprises sequences coding for a protein that is characteristic for at least one SARS-CoV-2 variant. In some embodiments, the protein that is characteristic for at least one SARS-CoV-2 variant is a protein that is encoded by a sequence having at least 90%, having at least 91%, having at least 92%, having at least 93%, having at least 94%, having at least 95%, at least 96%, at least 97%, at least 98%, at least 99%, at least 99.1%, at least 99.2%, at least 99.3%, at least 99.4%, at least 99.5%, at least 99.6%, at least 99.7%, at least 99.8%, or at least 99.9% sequence identity to the sequences SEQ. ID. 18, SEQ. ID. 21, SEQ. ID. 22 and/or SEQ. ID. 26.

[0148] This implementation of the relevant alterations can be achieved for example by insertion, deletion, substitution, and/or modification of at least one base, but not more than the percentage of the nucleotide acid sequence described herein.

[0149] In some embodiments, the nucleotide acid sequences the most similar nucleotide acid sequence described herein is a sequence defined by the SEQ. ID. 1, SEQ. ID. 3, SEQ. ID. 5, SEQ. ID. 7, SEQ. ID. 9, SEQ. ID. 11, SEQ. ID. 13, and/or SEQ. ID. 17.

[0150] In some embodiments, the nucleotide acid sequences the most similar nucleotide acid sequence described herein is at least one sequence defined by the SEQ. ID. 1, SEQ. ID. 5, SEQ. ID. 9, and/or SEQ. ID. 13.

[0151] In some embodiments, the insertion, deletion, or modification can be achieved by de novo synthesis of the nucleic acid of the invention using a series of chemical reaction steps using chemical reagents as described herein.

[0152] Altered sequences may comprise sequence features (e.g., the sequence features i)-vi) described above) that enable and/or improve the chemical production process of the altered sequences at more or different positions than the nucleotide acid sequences defined by the SEQ. ID. 1, SEQ. ID. 3, SEQ. ID. 5, SEQ. ID. 7, SEQ. ID. 9, SEQ. ID. 11, SEQ. ID. 13, and/or SEQ. ID. 17.

[0153] Their possible transformation into an IUPAC-classifiable molecule is known to the person skilled in the art. As an alternative to the deoxyribonucleic acid as defined above, a corresponding ribonucleic acid may also be present. In other words, in addition to the deoxyribonucleic acid sequence according to the sequence parts A-D, the definition according to the invention also includes a corresponding ribonucleic acid sequence. In these, the corresponding ribonucleic acid has sequence parts as defined above in which thymine (T) is replaced by uracil (U).

[0154] The base-pair sequence of the inventive long-chain nucleic acids, coding for the envelope proteins E, M, N and S of MHV and SARS-CoV-2 and, if applicable, the RNA-dependent RNA polymerase of MHV, represents the result of a complex development, in which, in a first step, a large number of sequence variants were formed by calculation starting from the natural amino acid sequence of the corresponding proteins, considering the redundancy of the genetic code.

[0155] Particularly, the base-pair sequence of the inventive long-chain nucleic acids, coding for the proteins E, M, N and/or S of SARS-CoV-2 represents the result of a complex development, in which, in a first step, a large number of sequence variants were formed by calculation starting from the natural amino acid sequence of the corresponding proteins, considering the redundancy of the genetic code.

[0156] From the resulting sequence tree, in a second step, the base-pair sequence for each of the encoded envelope proteins was determined which, firstly, is most similar to the natural sequence in terms of biological functionality and, secondly, also has the optimal sequence characteristics to enable the chemical production process.

[0157] Further, the sequences encode a combination of structural proteins of the wild-type virus. This enables a broad range of epitopes available to the immune system including T-cell epitopes (see, e.g., Grifoni, A., et al., 2020, Cell, 181(7), 1489-1501).

[0158] This broad range of epitopes may enable immunity against a broad range of virus variants in patients with or without pre-existing immunity.

[0159] Accordingly, the invention is at least in part based on the discovery that the nucleic acid of the invention, enables efficient production of a combination virus-like proteins with limited replication capabilities but similar antigenic effect to the original virus.

[0160] As mentioned, the nucleic acid according to the invention has at least 4′000 bases or base-pairs. Preferably, it has at least 8′000 bases, particularly preferably at least 20′000 bases, in a defined sequence. Further, it is preferred that the nucleic acid has a maximum size of 1′000′000 bases, preferably a maximum size of 200′000 bases.

[0161] Large sequences have repeatedly shown to be difficult to produce, amplify and/or express, but the large number of bases is beneficial to consistently produce a certain combination of viral-like proteins that have a similar antigenic effect to the original virus.

[0162] The means and methods provided herein, enable the production of the nucleic acid according to the invention in a certain length range (see, e.g., Example 1-3).

[0163] Accordingly, the invention is at least in part based on the discovery that the nucleic acid of the invention with a length in a certain length range, enables efficient production of a combination virus-like proteins with limited replication capabilities but similar antigenic effect to the original virus.

[0164] The nucleic acid according to the invention can be present in the form of a single long-chain nucleic acid or divided into separate long-chain nucleic acids.

[0165] In some embodiments, the nucleic acid according to the invention can be present in the form of a single long-chain nucleic acid or divided into up to 4 separate long-chain nucleic acids.

[0166] The separation into separate long-chain nucleic acids may facilitate amplification of the nucleic acids of the invention (Example 3).

[0167] According to a further preferred embodiment, the sequence parts A-D are arranged according to the sequence SEQ. ID. 16.

[0168] It is also preferred that sequence part D consists of SEQ. ID. 17, and codes for the protein sequence according to SEQ. ID. 18.

[0169] According to a further preferred embodiment, the sequence parts A-C are arranged according to the sequence SEQ. ID. 19 whereby the sequence part A codes for the protein sequence according to SEQ. ID. 26, the sequence part B codes for the protein sequence according to SEQ. ID. 21, the sequence part C encodes the protein sequence according to SEQ. ID. 22, and in addition the sequence parts A-C can be extended with sequences coding for SEQ. ID. 20, SEQ. ID. 22, SEQ. ID. 23, SEQ.

[0170] ID. 24, SEQ. ID. 25 and SEQ. ID. 27.

[0171] In some embodiments, the invention relates to the nucleotide acid sequence according the invention, wherein the nucleotide acid sequence is defined by a sequence having at least 98.5%, at least 98.6%, at least 98.7%, at least 98.8%, at least 98.9%, at least 99%, at least 99.1%, at least 99.2%, at least 99.3%, at least 99.4%, at least 99.5%, at least 99.6%, at least 99.7%, at least 99.8%, or at least 99.9% sequence identity to the SEQ. ID. 19 or the corresponding ribonucleic acid sequence.

[0172] It is particularly preferred to supplement the sequence parts A-D disclosed within this description with a nucleic acid sequence of sequence part E, which comprises a sequence according to SEQ. ID. 15 or SEQ. ID. 30, coding for the polyprotein sequences according to SEQ. ID. 31 and SEQ. ID. 32 of the RNA-dependent RNA polymerase of coronavirus.

[0173] The sequence according to SEQ. ID. 15 or SEQ. ID. 30 may represent a component of the nucleic acid according to the invention and thus be present in the same molecule in combination with two or more sequences of sequence parts A-D. It is also conceivable that it is present in a kit together with the nucleic acid according to the invention as a component of an independent molecule. The possible transfer into an IUPAC-classifiable molecule is known to the person skilled in the art.

[0174] The presence of sequence part E is relevant if, for gene expression of the corresponding proteins, RNA is introduced into a biotechnological production unit instead of a DNA plasmid. In this respect, it is also conceivable that sequence part E is introduced into a kit in the form of RNA according to SEQ. ID. 33 or SEQ. ID. 34 is present in a kit. This will be explained further in the context of the specific examples below.

[0175] It has been shown that these concrete sequences are particularly advantageous firstly with regard to their similarity to the natural sequence or their biological functionality and secondly with regard to the chemical production process.

[0176] According to another preferred embodiment, the nucleic acid comprises at least three of the four sequence parts A-D in any arrangement. In this respect, it is particularly preferred that the nucleic acid comprises the four sequence parts A-D in any arrangement.

[0177] Further, it is preferred that the nucleic acid additionally comprises at least one sequence consisting of the group of
[0178] SEQ. ID. 15
[0179] SEQ. ID. 28
[0180] SEQ. ID. 29 and
[0181] SEQ. ID. 30.

[0182] In some embodiments, the nucleic acid of the invention comprises one of the deoxyribonucleic acid sequences according to the sequence parts SEQ. ID. 15, SEQ.

[0183] ID. 28, SEQ. ID. 29 and SEQ. ID. 30 or the corresponding ribonucleic acid sequence.

[0184] In some embodiments, the invention relates to the nucleic acid according to the invention, characterized in that the nucleic acid comprises SEQ. ID. 28, or the corresponding ribonucleic acid sequence.

[0185] In some embodiments, the invention relates to the nucleic acid according to the invention, characterized in that the nucleic acid comprises SEQ. ID. 29, or the corresponding ribonucleic acid sequence.

[0186] In some embodiments, the invention relates to the nucleic acid according to the invention, characterized in that the nucleic acid comprises SEQ. ID. 28 and SEQ. ID. 29, or the corresponding ribonucleic acid sequence.

[0187] The nucleic acids of the invention have the special property that they can be incorporated by standard methods into a cell line or other production organism and stimulate the production of fragments or whole envelopes of a virus. The standard methods required for this purpose are known to the person skilled in the art and are described in the context of the concrete examples.

[0188] The inventors found, that virus particles can be amplified and subsequently translated and successfully assembled despite omission of certain ORFs that were considered useful for the effective replicability of the original virus. The resulting virus particle may still be able to infect cells and induce the production of non-infective virus fragments.

[0189] The inventors found that the ORF6 and ORF8 of the SARS-CoV-2 virusgenome (see FIG. 5) can be omitted or deleted and virus assembly remains possible.

[0190] In some embodiments, the invention relates to the nucleic acid according to the invention, wherein the nucleic acid additionally comprises
[0191] a) 1.) an ORF1ab sequence defined by the SEQ. ID. 51 or a sequence having at least 98.5%, at least 98.6%, at least 98.7%, at least 98.8%, at least 98.9%, at least 99%, at least 99.1%, at least 99.2%, at least 99.3%, at least 99.4%, at least 99.5%, at least 99.6%, at least 99.7%, at least 99.8%, or at least 99.9% sequence identity to SEQ. ID. 51; or
[0192] 2.) i) an ORF1b sequence defined by the SEQ. ID. 59 or a sequence having at least 98.5%, at least 98.6%, at least 98.7%, at least 98.8%, at least 98.9%, at least 99%, at least 99.1%, at least 99.2%, at least 99.3%, at least 99.4%, at least 99.5%, at least 99.6%, at least 99.7%, at least 99.8%, or at least 99.9% sequence identity to SEQ. ID. 59; and
[0193] ii) an ORF1a sequence defined by the SEQ. ID. 58 or a sequence having at least 98.6%, at least 98.7%, at least 98.8%, at least 98.9%, at least 99%, at least 99.1%, at least 99.2%, at least 99.3%, at least 99.4%, at least 99.5%, at least 99.6%, at least 99.7%, at least 99.8%, or at least 99.9% sequence identity to SEQ. ID. 58;
[0194] b) an ORF3a sequence defined by the SEQ. ID. 52 or a sequence having at least 99%, at least 99.1%, at least 99.3%, at least 99.4%, at least 99.5%, at least 99.7%, at least 99.8%, or at least 99.9% sequence identity to SEQ. ID 52; and
[0195] c) an ORF7a sequence defined by the SEQ. ID. 54 or a sequence having at least 99.5% sequence identity to SEQ. ID. 54.

[0196] In some embodiments, the invention relates to the nucleic acid according to the invention, wherein the nucleic acid additionally comprises
[0197] a) 1.) an ORF1ab sequence defined by the SEQ. ID. 51 or a sequence having at least 98.5%, at least 98.6%, at least 98.7%, at least 98.8%, at least 98.9%, at least 99%, at least 99.1%, at least 99.2%, at least 99.3%, at least 99.4%, at least 99.5%, at least 99.6%, at least 99.7%, at least 99.8%, or at least 99.9% sequence identity to SEQ. ID. 51; or
[0198] 2.) i) an ORF1b sequence defined by the SEQ. ID. 59 or a sequence having at least 98.5%, at least 98.6%, at least 98.7%, at least 98.8%, at least 98.9%, at least 99%, at least 99.1%, at least 99.2%, at least 99.3%, at least 99.4%, at least 99.5%, at least 99.6%, at least 99.7%, at least 99.8%, or at least 99.9% sequence identity to SEQ. ID. 59; and
[0199] ii) a n ORF1a sequence defined by the SEQ. ID. 58 or a sequence having at least 98.6%, at least 98.7%, at least 98.8%, at least 98.9%, at least 99%, at least 99.1%, at least 99.2%, at least 99.3%, at least 99.4%, at least 99.5%, at least 99.6%, at least 99.7%, at least 99.8%, or at least 99.9% sequence identity to SEQ. ID. 58;
[0200] b) an ORF3a sequence defined by the SEQ. ID. 52 or a sequence having at least 99%, at least 99.1%, at least 99.3%, at least 99.4%, at least 99.5%, at least 99.7%, at least 99.8%, or at least 99.9% sequence identity to SEQ. ID 52;
[0201] c) an ORF7a sequence defined by the SEQ. ID. 54 or a sequence having at least 99.5% sequence identity to SEQ. ID. 54; and
[0202] d) an ORF8 sequence defined by the SEQ. ID. 55 or a sequence having at least 99%, having at least 99.3%, or having at least 99.6% sequence identity to SEQ. ID 55.

[0203] In some embodiments, the invention relates to the nucleic acid according to the invention, wherein the nucleic acid additionally comprises
[0204] a) 1.) an ORF1ab sequence defined by the SEQ. ID. 51 or a sequence having at least 98.5%, at least 98.6%, at least 98.7%, at least 98.8%, at least 98.9%, at least 99%, at least 99.1%, at least 99.2%, at least 99.3%, at least 99.4%, at least 99.5%, at least 99.6%, at least 99.7%, at least 99.8%, or at least 99.9% sequence identity to SEQ. ID. 51; or
[0205] 2.) i) an ORF1b sequence defined by the SEQ. ID. 59 or a sequence having at least 98.5%, at least 98.6%, at least 98.7%, at least 98.8%, at least 98.9%, at least 99%, at least 99.1%, at least 99.2%, at least 99.3%, at least 99.4%, at least 99.5%, at least 99.6%, at least 99.7%, at least 99.8%, or at least 99.9% sequence identity to SEQ. ID. 59; and
[0206] ii) a n ORF1a sequence defined by the SEQ. ID. 58 or a sequence having at least 98.6%, at least 98.7%, at least 98.8%, at least 98.9%, at least 99%, at least 99.1%, at least 99.2%, at least 99.3%, at least 99.4%, at least 99.5%, at least 99.6%, at least 99.7%, at least 99.8%, or at least 99.9% sequence identity to SEQ. ID. 58;
[0207] b) an ORF3a sequence defined by the SEQ. ID. 52 or a sequence having at least 99%, at least 99.1%, at least 99.3%, at least 99.4%, at least 99.5%, at least 99.7%, at least 99.8%, or at least 99.9% sequence identity to SEQ. ID 52;
[0208] c) an ORF7a sequence defined by the SEQ. ID. 54 or a sequence having at least 99.5% sequence identity to SEQ. ID. 54; and
[0209] d) an ORF6 sequence defined by the SEQ. ID. 53 or a sequence having at least 94.1% at least 94.7%, at least 95.2%, at least 95.8%, at least 96.3%, at least 96.8%, at least 97.4%, at least 97.9%, or at least 98.5%, at least 99%, or at least 99.6%, sequence identity to SEQ. ID 53.

[0210] In some embodiments, the invention relates to the nucleic acid according to the invention, wherein the nucleic acid additionally comprises
[0211] a) 1.) an ORF1ab sequence defined by the SEQ. ID. 51 or a sequence having at least 98.5%, at least 98.6%, at least 98.7%, at least 98.8%, at least 98.9%, at least 99%, at least 99.1%, at least 99.2%, at least 99.3%, at least 99.4%, at least 99.5%, at least 99.6%, at least 99.7%, at least 99.8%, or at least 99.9% sequence identity to SEQ. ID. 51; or
[0212] 2.) i) an ORF1b sequence defined by the SEQ. ID. 59 or a sequence having at least 98.5%, at least 98.6%, at least 98.7%, at least 98.8%, at least 98.9%, at least 99%, at least 99.1%, at least 99.2%, at least 99.3%, at least 99.4%, at least 99.5%, at least 99.6%, at least 99.7%, at least 99.8%, or at least 99.9% sequence identity to SEQ. ID. 59; and
[0213] ii) a n ORF1a sequence defined by the SEQ. ID. 58 or a sequence having at least 98.6%, at least 98.7%, at least 98.8%, at least 98.9%, at least 99%, at least 99.1%, at least 99.2%, at least 99.3%, at least 99.4%, at least 99.5%, at least 99.6%, at least 99.7%, at least 99.8%, or at least 99.9% sequence identity to SEQ. ID. 58;
[0214] b) an ORF3a sequence defined by the SEQ. ID. 52 or a sequence having at least 99%, at least 99.1%, at least 99.3%, at least 99.4%, at least 99.5%, at least 99.7%, at least 99.8%, or at least 99.9% sequence identity to SEQ. ID 52;
[0215] c) an ORF7a sequence defined by the SEQ. ID. 54 or a sequence having at least 99.5% sequence identity to SEQ. ID. 54;
[0216] d) an ORF6 sequence defined by the SEQ. ID. 53 or a sequence having at least 94.1% at least 94.7%, at least 95.2%, at least 95.8%, at least 96.3%, at least 96.8%, at least 97.4%, at least 97.9%, at least 98.5%, at least 99%, or at least 99.6%, sequence identity to SEQ. ID 53; and
[0217] e) an ORF8 sequence defined by the SEQ. ID. 55 or a sequence having at least 99%, having at least 99.3%, or having at least 99.6% sequence identity to SEQ. ID 55.

[0218] In some embodiments, the invention relates to the nucleic acid according to the invention, wherein the nucleic acid additionally comprises a 3′UTR, a 5′UTR, a TRS-L, a TRS-B: S, a TRS-B: orf3a, a TRS-B: E, a TRS-B: M, a TRS-B: orf6, a TRS-B: orf7a, a TRS-B: orf8 and/or a TRS-B: N.

[0219] In some embodiments, the invention relates to the nucleic acid according to the invention, wherein the nucleic acid additionally comprises a 3′UTR defined by the SEQ. ID. 57 and/or a 5′UTR defined by the SEQ. ID. 56.

[0220] In some embodiments, the invention relates to the nucleic acid according to the invention, wherein the nucleic acid additionally comprises a TRS-L, a TRS-B: S, a TRS-B: orf3a, a TRS-B: E, a TRS-B: M, a TRS-B: orf6, a TRS-B: orf7a, a TRS-B: orf8 and/or a TRS-B: N are/is defined by the sequence ACGAAC.

[0221] In some embodiments, the nucleic acid sequence comprises a sequence defined by SEQ. ID. 41 or a sequence having at least 98.5%, at least 98.6%, at least 98.7%, at least 98.8%, at least 98.9%, at least 99%, at least 99.1%, at least 99.2%, at least 99.3%, at least 99.4%, at least 99.5%, at least 99.6%, at least 99.7%, at least 99.8%, or at least 99.9% sequence identity to SEQ. ID. 41.

[0222] In some embodiments, the nucleic acid sequence comprises a sequence defined by SEQ. ID. 42 or a sequence having at least 98.5%, at least 98.6%, at least 98.7%, at least 98.8%, at least 98.9%, at least 99%, at least 99.1%, at least 99.2%, at least 99.3%, at least 99.4%, at least 99.5%, at least 99.6%, at least 99.7%, at least 99.8%, or at least 99.9% sequence identity to SEQ. ID. 42.

[0223] In some embodiments, the nucleic acid sequence comprises a sequence defined by SEQ. ID. 43 or a sequence having at least 98.5%, at least 98.6%, at least 98.7%, at least 98.8%, at least 98.9%, at least 99%, at least 99.1%, at least 99.2%, at least 99.3%, at least 99.4%, at least 99.5%, at least 99.6%, at least 99.7%, at least 99.8%, or at least 99.9% sequence identity to SEQ. ID. 43.

[0224] In some embodiments, the nucleic acid sequence comprises a sequence defined by SEQ. ID. 44 or a sequence having at least 98.5%, at least 98.6%, at least 98.7%, at least 98.8%, at least 98.9%, at least 99%, at least 99.1%, at least 99.2%, at least 99.3%, at least 99.4%, at least 99.5%, at least 99.6%, at least 99.7%, at least 99.8%, or at least 99.9% sequence identity to SEQ. ID. 44.

[0225] In some embodiments, the nucleotide acid sequence described herein, refers to the corresponding ribonucleic acid sequence.

[0226] ORF6 and ORF8 of SARS-CoV-2 inhibit the type I interferon signaling pathway (Li, J. Y., et al., 2020, Virus research, 286, 198074) and therefore impede an adequate immune response. Therefore, deletion or omittion of the sequence of ORF6 and/or ORF8 of SARS-CoV-2 in the vector does not only limit the reproducibility of the encoded viral particles but also increases antigenicity thereof.

[0227] Accordingly, the invention is at least in part based on the discovery that the nucleotide acid sequence of the invention encodes virus particles or parts thereof with a surprising antigenicity and limited replication capabilities.

[0228] In some embodiments, the nucleic acid sequence of the invention is a vector or part of a vector.

[0229] The term “vector”, as used herein, refers to a nucleic acid molecule, capable of transferring or transporting itself and/or another nucleic acid molecule into a cell. The transferred nucleic acid is generally linked to, i.e., inserted into, the vector nucleic acid molecule. A vector may include sequences that direct autonomous replication in a cell, or may include sequences sufficient to allow integration into host cell DNA. In some embodiments, the vector described herein is a vector selected from the group of plasmids (e.g., DNA plasmids or RNA plasmids), shuttle vectors, transposons, cosmids, bacterial artificial chromosomes, and viral vectors.

[0230] In certain embodiments, the invention relates to the vector according to the invention, wherein the vector does not comprise sequence part B and the regulation of sequence part A does not comprise at least one accessory protein.

[0231] In certain embodiments, the invention relates to the vector according to the invention, wherein the vector is a plasmid vector.

[0232] In some embodiments, the plasmid vector described herein has a selection marker and sequence determining the origin of replication. In some embodiments, the invention relates to a vector according to the invention, wherein the vector comprises the sequences defined by the SEQ. ID. 46 and SEQ. ID. 47.

[0233] In some embodiments, the invention relates to a vector according to the invention, wherein the vector comprises at least one sequence encoding an RNA-polymerase promoter and at least one untranslated region that contains sequences that enable the synthesis of negative-strand RNA and/or that enable positive-strand RNA synthesis.

[0234] In some embodiments, the invention relates to a vector according to the invention, wherein the vector comprises at least one sequence encoding an T7 promoter and at least two untranslated regions that contain sequences that enable the synthesis of negative-strand RNA and/or that enable positive-strand RNA synthesis.

[0235] In some embodiments, the invention relates to a vector according to the invention, wherein the vector comprises at least one sequence encoding an T7 promoter as defined by the SEQ. ID. 28, and at least two untranslated regions that comprise the sequences according to the SEQ. ID. 56 and 57.

[0236] In some embodiments, the invention relates to the vector according to the invention, wherein the vector is a plasmid vector.

[0237] In some embodiments, the invention relates to the vector according to the invention, wherein the vector comprises a sequence as defined in SEQ. ID. 45.

[0238] In some embodiments, the nucleotide acid sequence described herein, comprises a sequence having at least 50%, at least 60%, at least 70%, at least 80%, at least 90%, at least 91%, at least 92%, at least 93%, at least 94%, at least 95%, at least 96%, at least 97%, at least 98%, or at least 99% sequence identity to the SEQ. ID. 45.

[0239] In some embodiments, the vector described herein, comprises a sequence i) having at least 50%, at least 60%, at least 70%, at least 80%, at least 90%, at least 91%, at least 92%, at least 93%, at least 94%, at least 95%, at least 96%, at least 97%, at least 98%, or at least 99% sequence identity to the SEQ. ID. 45; and ii) comprising selection marker as defined by the SEQ. ID. 47 and a origin of replication as defined by the SEQ. ID. 46.

[0240] In some embodiments, the vector described herein is used in combination with at least one transfection enhancer, e.g., a transfection enhancer selected from the group of oligonucleotides, lipoplexes, polymersomes, polyplexes, dendrimers, inorganic nanoparticles and cell-penetrating peptides.

[0241] The vector described herein can be used for efficient transfer and/or amplification of the nucleic acid sequence of the invention in an amplifying biotechnological production unit (Example 3).

[0242] The product of the amplification in an amplifying biotechnological production unit (e.g., yeast cells) may be isolated and subsequently translated in a further biotechnological production unit (e.g., human cell).

[0243] Accordingly, the invention is at least in part based on the discovery that the vector described herein enables efficient amplification of the nucleic acids described herein and efficient production of a combination virus-like proteins with limited replication capabilities but high antigenicity. The inventive nucleic acids lead through the above procedure to the production of a dispersion comprising proteins and other building blocks.

[0244] Suitable separation methods known to the person skilled in the art, such as centrifugation or chromatography, can be used to separate these building blocks, if necessary also from residues of the production cell line used or other production aids or organisms, and thus purify them.

[0245] In some embodiments, the building blocks described herein are purified using at least one separation method selected from the group of chromatography, precipitation, ultracentrifugation, tangential-flow filtration, and enzymatic digestion These optionally purified virus envelopes or fragments thereof represent the basis of the vaccine, which is then transferred into different dosage forms depending on the type of application.

[0246] Typically, an adjuvant is used for this purpose, stabilizers to improve shelf-life, salts and buffers. The vaccines are thus the product of the long-chain, fully synthetic nucleic acids described here.

[0247] In some embodiments, the invention relates to a virus envelope, a fragment of a virus envelope and/or virus envelope protein obtainable by gene expression using at least one nucleic acid according to the invention using the vector according to the invention, using the kit according to the invention, or the biotechnological production unit according to the invention, wherein the virus envelope, the fragment of a virus envelope and/or the virus envelope protein package the at least one nucleic acid according to the invention.

[0248] In some embodiments, the invention relates to a virus envelope obtainable by gene expression using at least one nucleic acid according to the invention using the vector according to the invention, using the kit according to the invention, or the biotechnological production unit according to the invention.

[0249] The term “virus envelope”, as used herein, refers to protein assembly such as a protein layer that has a stabilizing function for a nucleotide acid sequence (such as the nucleotide acid sequence of the invention). In some embodiments, the virus envelope described herein enables the assimilation of the nucleotide acid sequence of the invention into a human cell. In some embodiments, the virus envelope described herein comprises a spike protein, envelope protein and a membrane protein.

[0250] In some embodiments, the invention relates to a fragment of a virus envelope obtainable by gene expression using at least one nucleic acid according to the invention using the vector according to the invention, using the kit according to the invention, or the biotechnological production unit according to the invention.

[0251] The term “fragment of a virus envelope”, as used herein, refers to at least two assembled proteins that form an incomplete virus envelope.

[0252] In some embodiments, the invention relates to a virus envelope protein obtainable by gene expression using at least one nucleic acid according to the invention using the vector according to the invention, using the kit according to the invention, or the biotechnological production unit according to the invention.

[0253] The term “virus envelope protein”, as used herein, refers to at least one protein that can form part of a viral envelope.

[0254] In some embodiments, the invention relates to a virus envelope, a fragment of a virus envelope and/or virus envelope protein obtainable by gene expression using at least one nucleic acid according to the invention using the vector according to the invention, using the kit according to the invention, or the biotechnological production unit according to the invention, wherein the virus envelope, the fragment of a virus envelope and/or the virus envelope protein package the at least one nucleic acid according to the invention.

[0255] The term “packaged”, as used herein, refers to at least partially engulfed and/or linked. In some embodiments, the packageing nucleotid acid of the invention in the virus envelope, the fragment of a virus envelope and/or the virus envelope protein enables entrance into human cells.

[0256] The products of the nucleic acid and/or the vector of the invention show a particularly high antigenic similarity to the corresponding functional virus, if the products are embodied in a virus envelope, a fragment of a virus envelope and/or virus envelope protein. Therefore, the elicited/induced immune reaction will likely induce an immune reaction that is particularly beneficial for the actual contact with the functional virus.

[0257] The nucleotide acid packaged in the virus envelope, the fragment of a virus envelope and/or the virus envelope protein can be transferred into human cell of a subject and induce production of viral proteins in the human cell. This results in prolonged and enhanced exposure of antigenic virus-like proteins with limited replication capabilities.

[0258] Accordingly, the invention is at least in part based on the discovery that the vector described herein enables efficient production of a combination virus-like proteins with limited replication capabilities but similar antigenic effect to the original virus.

[0259] In some embodiments, the invention relates to the vector of the invention for use in treatment.

[0260] In some embodiments, the invention relates to the biotechnological production unit of the invention for use in treatment.

[0261] In some embodiments, the invention relates to the virus envelope, the fragment of a virus envelope and/or the virus envelope protein of the invention for use in treatment.

[0262] The term “treatment” (and grammatical variations thereof such as “treat” or “treating”), as used herein, refers to clinical intervention in an attempt to alter the natural course of the individual being treated, and can be performed either for prophylaxis or during the course of clinical pathology. Desirable effects of treatment include, but are not limited to, preventing occurrence or recurrence of disease, alleviation of symptoms, diminishment of any direct or indirect pathological consequences of the disease, decreasing the rate of disease progression, amelioration or palliation of the disease state, and remission or improved prognosis.

[0263] In some embodiments, the invention relates the vector, the biotechnological production unit, the virus envelope, the fragment of a virus envelope and/or the virus envelope protein of the invention for use in the treatment of SARS-CoV-2 infections.

[0264] In some embodiments, the invention relates the vector, the biotechnological production unit, the virus envelope, the fragment of a virus envelope and/or the virus envelope protein of the invention for use in the prevention of SARS-CoV-2 infections.

[0265] In some embodiments, the invention relates the vector, the biotechnological production unit, the virus envelope, the fragment of a virus envelope and/or the virus envelope protein of the invention for use in the treatment of active SARS-CoV-2 infections.

[0266] In some embodiments, the invention relates to a vaccine against the coronavirus SARS-CoV-2 comprising at least one nucleic acid according to the invention and products obtainable by gene expression using at least one nucleic acid according to the invention in a production organism.

[0267] In some embodiments, the invention relates to a vaccine against the coronavirus SARS-CoV-2 comprising at least one nucleic acid according to the invention and products obtainable by using the vector according to the invention in a production organism.

[0268] In some embodiments, the invention relates to a vaccine against the coronavirus SARS-CoV-2 comprising at least one nucleic acid according to the invention and products obtainable by using the kit according to the invention in a production organism.

[0269] In some embodiments, the invention relates to a vaccine against the coronavirus SARS-CoV-2 comprising at least one nucleic acid according to the invention and products obtainable by gene expression using at least one nucleic acid according to the invention, using the vector according to the invention, using the kit according to the invention in a production organism, in particular comprising the virus envelope, the fragment of a virus envelope and/or the virus envelope protein according to the invention.

[0270] The term “vaccine”, as used herein, refers to any agent or composition, capable of inducing/eliciting an immune response in a host and which permits to treat and/or prevent an infection and/or a disease. Therefore, non-limiting examples of such agents include proteins, polypeptides, protein/polypeptide fragments, immunogens, antigens, peptide epitopes, epitopes, mixtures of proteins, peptides or epitopes as well as nucleic acids, genes and/or portions of genes (encoding a polypeptide or protein of interest or a fragment thereof).

[0271] The term “against the coronavirus SARS-CoV-2”, as used herein, refers to treatment and/or prevention of a SARS-CoV-2 infection.

[0272] The structural proteins of coronaviruses have shown to elicit an immune response (see, e.g., Li, J. Y., et al., 2020, Virus research, 286, 198074; Walls, A. C., et al., 2020, Cell, 181(2), 281-292.e6; Chen, Z, et al., 2004, Clinical chemistry, 50(6), 988-995; Peng, Y., et al., 2020, Nature immunology, 21(11), 1336-1345.). The means and methods provided enable to inducing/eliciting an equivalent immune response by the production and administration of a vaccine with the equivalent epitopes and/or particles with reduced immune evading mechanisms. In some embodiments, the vaccine induces production of particles with limited replicative capabilities in subject to

[0273] Thus, these vaccines thus differ massively from classical vaccines, which are often derived from animal serum and are therefore molecularly inconsistent. The production from animal organisms is traditionally the method of choice. However, the molecularly unclear products lead to massive quality problems and variation from production batch to production batch. This is also associated with the long approval period and the side effects that are often discovered only late. A molecularly defined product composition, as it can be obtained using the nucleic acid according to the invention, is therefore advantageous.

[0274] Furthermore, the vaccine described herein, is both clearly defined and offers a broad range of antigenic epitopes. This results in the advantage that the vaccine has a low or no requirement for adjuvants that enhance the immune response. Such adjuvants that enhance the immune response are typically associated with side effects such as allergic reactions in some patients. Furthermore, the primary active components of the vaccine as described herein are protein-based and are therefore more thermostable compared to other vaccines (e.g., RNA vaccines). The vaccine of the invention is therefore easily transportable and storable due to its stability.

[0275] Accordingly, the invention is a least in part based on the discovery, that the vaccine as described herein is particularly useful against the coronavirus SARS-CoV-2.

[0276] In some embodiments, the invention relates to a kit comprising two or more nucleic acids according to the invention.

[0277] In some embodiments, the invention relates to a kit comprising at least two nucleic acids selected from the group of SEQ. ID. 35, SEQ. ID. 36, SEQ. ID. 37, and SEQ. ID. 38.

[0278] In this combination of vectors, the kit enables production of viral proteins human body.

[0279] In addition to the said nucleic acid, the invention also relates to a kit comprising two or more nucleic acids, wherein the nucleic acids are deoxyribonucleic acids (DNA) according to one of the preceding claims and/or corresponding ribonucleic acids (RNA) with the corresponding base-pair sequence. In other words, the corresponding ribonucleic acid has sequence parts as defined above in which thymine (T) is replaced by uracil (U).

[0280] The kit described herein, can be prepared by collecting the necessary biotechnological production unit(s) and reagents. If the nucleic acids comprised in the kit are present in the form of DNA, it is further preferred that they are present in at least one plasmid, preferably in two or more plasmids. This allows the nucleic acid to be easily introduced into a corresponding biotechnological production unit, as is also described in the context of the concrete examples below.

[0281] In a particularly embodiment of the present invention, the kits (to be prepared in context) of this invention or the methods and uses of the invention may further comprise or be provided with (an) instruction manual(s). For example, said instruction manual(s) may guide the skilled person (how) to employ the kit of the invention in the diagnostic uses provided herein and in accordance with the present invention. Particularly, said instruction manual(s) may comprise guidance to use or apply the herein provided methods or uses.

[0282] Accordingly, the invention is at least in part based on the discovery, that it enables efficient and safe production of virus particles and/or parts thereof.

[0283] According to another aspect, the invention thus also concerns a biotechnological production unit comprising at least one plasmid as defined above, in particular two or more plasmids. The production unit on which this further aspect of the invention is based is usually a production organism or cell line known to the skilled person for the purposes described

[0284] According to another aspect, the present invention also concerns the product resulting from the application of the corresponding long-chain, fully synthetic nucleic acids in a suitable production organism or cell line. These products belong to the class of envelope proteins, often with additional sugar or fatty acid groups. In concrete terms, this further aspect thus concerns a virus envelope, a fragment of a virus envelope and/or a virus envelope protein obtainable by gene expression using the nucleic acids or using the kit as defined above.

[0285] It is important here that the assignment is mathematically unambiguous: A nucleic acid i produces a product i that is precisely dependent on it. A nucleic acid j that is even slightly different produces another product j that is also precisely dependent on it. The two relationships between product and nucleic acids are unambiguous and describable. Each type of product k can be assigned to a nucleic acid k. It is therefore justified to speak of a direct relationship between the nucleic acid and the product, i.e. the virus envelope or fragments thereof.

[0286] Wherever alternatives for individual separable features are presented here as “embodiments”, it is understood that such alternatives can be freely combined to form discrete embodiments of the invention disclosed herein.

[0287] It should be mentioned that the assembly of virus envelopes is carried out at different speeds and varies in cleanliness depending on the organism and type, so in practice, envelopes and fragments thereof are always found together. If necessary, however, they can be separated by common methods.

[0288] In some embodiments, the envelopes described herein are purified using at least one purification method selected from the group of chromatography, precipitation, ultracentrifugation, tangential-flow filtration, and enzymatic digestion.

[0289] According to a further aspect of the invention, the direct product of the inventive long-chain nucleic acids is thus converted into a vaccine by means of optional purification steps and possible auxiliary means. Specifically, this further aspect thus concerns a vaccine comprising products obtainable by gene expression using at least one nucleic acid or kit as defined above in a production organism, in particular comprising one or more of the above-mentioned protein components or parts thereof.

[0290] This vaccine is typically a physiological saline solution with the above-mentioned additives and typically small concentrations of the above-described virus envelopes and/or fragments.

[0291] Although the vaccine described herein, is less dependent on the effect of adjuvants than other vaccines, the vaccine may still comprise adjuvants to enhance the effect of the vaccine. In some embodiments, the vaccine comprises at least one adjuvant selected from the group of inorganic compounds (e.g., potassium alum, aluminium hydroxide, aluminium phosphate, calcium phosphate hydroxide), oils (e.g., paraffin oil, peanut oil), bacterial products, saponins, cytokines (e.g., IL-1, IL-2, IL-12) and squalene.

[0292] In some embodiments, the vaccine is administered by at least one route of administration selected from the group of oral administration, rectal administration, inhalation, nasal administration, parental administration, intramuscular administration, subcutaneous administration and intradermal administration.

[0293] Typical vaccines are injected or can be applied through the mucous membranes, depending on the dosage form.

[0294] As mentioned above, the vaccine is specifically a vaccine against the coronavirus SARS-CoV-2. Specifically, it comprises at least two molecularly precisely defined protein components selected from the group consisting of the protein components a, b1, b2, c1 or c2, d1 or d2, whereby
[0295] (i) the protein component a comprises the sequence as defined by SEQ. ID. 14 and SEQ. ID. 18 analogous to the S protein of SARS-CoV-2; and
[0296] (ii) the protein component b1 comprises the sequence set out in SEQ. ID. 6 and SEQ. ID. 21 analogous to the envelope protein E of SARS-CoV-2 and protein component b2 comprises the sequence according to SEQ. ID. 8 analogous to the envelope protein E of MHV59A or an equivalent protein; and
[0297] (iii) the protein component c1 comprises the sequence according to SEQ. ID. 10 and SEQ. ID. 22 analogous to the membrane protein M of SARS-CoV-2 and protein component (c2) the sequence according to SEQ. ID. 12 analogous to membrane protein M of MHV59A or an equivalent protein; and
[0298] (iv) the protein component d1 comprises the sequence according to SEQ. ID. 2 and SEQ. ID. 26 analogous to the nucleocapsid phosphoprotein N of SARS-CoV-2 and the protein component d2 comprises the sequence according to SEQ. ID. 4 analogous to the nucleocapsid phosphoprotein N of MHV59A or an equivalent protein.

[0299] It should be noted that the protein components a, b1, b2, c1, c2, d1 or d2 are similar but not identical to the corresponding naturally occurring analogues, which results from the fact that they are produced from synthetic nucleic acids which differ in sequence from the sequence of the corresponding natural nucleic acids.

[0300] The protein component a disclosed within this description comprises a sequence according to SEQ. ID. 14 and SEQ. ID. 18. In some embodiments, the protein component a comprises a sequence having at least 90%, having at least 91%, having at least 92%, having at least 93%, having at least 94%, having at least 95%, at least 96%, at least 97%, at least 98%, at least 99%, at least 99.1%, at least 99.2%, at least 99.3%, at least 99.4%, at least 99.5%, at least 99.6%, at least 99.7%, at least 99.8%, or at least 99.9% sequence identity to SEQ. ID. 14.

[0301] In some embodiments, the protein component a comprises a sequence having at least 90%, having at least 91%, having at least 92%, having at least 93%, having at least 94%, having at least 95%, at least 96%, at least 97%, at least 98%, at least 99%, at least 99.1%, at least 99.2%, at least 99.3%, at least 99.4%, at least 99.5%, at least 99.6%, at least 99.7%, at least 99.8%, or at least 99.9% sequence identity to SEQ. ID. 18.

[0302] The protein component b1 disclosed within this description comprises a sequence according to SEQ. ID. 6 and SEQ. ID. 21. In some embodiments, the protein component b1 comprises a sequence at least 90%, having at least 91%, having at least 92%, having at least 93%, having at least 94%, having at least 95%, at least 96%, at least 97%, at least 98%, at least 99%, at least 99.1%, at least 99.2%, at least 99.3%, at least 99.4%, at least 99.5%, at least 99.6%, at least 99.7%, at least 99.8%, or at least 99.9% sequence identity to SEQ. ID. 6.

[0303] In some embodiments, the protein component b1 comprises a sequence having at least 90%, having at least 91%, having at least 92%, having at least 93%, having at least 94%, having at least 95%, at least 96%, at least 97%, at least 98%, at least 99%, at least 99.1%, at least 99.2%, at least 99.3%, at least 99.4%, at least 99.5%, at least 99.6%, at least 99.7%, at least 99.8%, or at least 99.9% sequence identity to SEQ. ID. 21.

[0304] The protein component b2 disclosed within this description comprises a sequence according to SEQ. ID. 8. In some embodiments, the protein component b2 comprises a sequence having at least 90%, having at least 91%, having at least 92%, having at least 93%, having at least 94%, having at least 95%, at least 96%, at least 97%, at least 98%, at least 99%, at least 99.1%, at least 99.2%, at least 99.3%, at least 99.4%, at least 99.5%, at least 99.6%, at least 99.7%, at least 99.8%, or at least 99.9% sequence identity to SEQ. ID. 8.

[0305] The protein component c1 disclosed within this description comprises a sequence according to SEQ. ID. 10 and SEQ. ID. 22. In some embodiments, the protein component c1 comprises a sequence having at least 90%, having at least 91%, having at least 92%, having at least 93%, having at least 94%, having at least 95%, at least 96%, at least 97%, at least 98%, at least 99%, at least 99.1%, at least 99.2%, at least 99.3%, at least 99.4%, at least 99.5%, at least 99.6%, at least 99.7%, at least 99.8%, or at least 99.9% sequence identity to SEQ. ID. 10.

[0306] In some embodiments, the protein component c1 comprises a sequence having at least 90%, having at least 91%, having at least 92%, having at least 93%, having at least 94%, having at least 95%, at least 96%, at least 97%, at least 98%, at least 99%, at least 99.1%, at least 99.2%, at least 99.3%, at least 99.4%, at least 99.5%, at least 99.6%, at least 99.7%, at least 99.8%, or at least 99.9% sequence identity to SEQ. ID. 22.

[0307] The protein component c2 disclosed within this description comprises a sequence according to SEQ. ID. 12. In some embodiments, the protein component c2 comprises a sequence having at least 90%, having at least 91%, having at least 92%, having at least 93%, having at least 94%, having at least 95%, at least 96%, at least 97%, at least 98%, at least 99%, at least 99.1%, at least 99.2%, at least 99.3%, at least 99.4%, at least 99.5%, at least 99.6%, at least 99.7%, at least 99.8%, or at least 99.9% sequence identity to SEQ. ID. 12.

[0308] The protein component d1 disclosed within this description comprises a sequence according to SEQ. ID. 2 and SEQ. ID. 26. In some embodiments, the protein component d1 comprises a sequence having at least 90%, having at least 91%, having at least 92%, having at least 93%, having at least 94%, having at least 95%, at least 96%, at least 97%, at least 98%, at least 99%, at least 99.1%, at least 99.2%, at least 99.3%, at least 99.4%, at least 99.5%, at least 99.6%, at least 99.7%, at least 99.8%, or at least 99.9% sequence identity to SEQ. ID. 2.

[0309] In some embodiments, the protein component d1 comprises a sequence having at least 90%, having at least 91%, having at least 92%, having at least 93%, having at least 94%, having at least 95%, at least 96%, at least 97%, at least 98%, at least 99%, at least 99.1%, at least 99.2%, at least 99.3%, at least 99.4%, at least 99.5%, at least 99.6%, at least 99.7%, at least 99.8%, or at least 99.9% sequence identity to SEQ. ID. 26.

[0310] The protein component d2 disclosed within this description comprises a sequence according to SEQ. ID. 4. In some embodiments, the protein component d2 comprises a sequence having at least 90%, having at least 91%, having at least 92%, having at least 93%, having at least 94%, having at least 95%, at least 96%, at least 97%, at least 98%, at least 99%, at least 99.1%, at least 99.2%, at least 99.3%, at least 99.4%, at least 99.5%, at least 99.6%, at least 99.7%, at least 99.8%, or at least 99.9% sequence identity to SEQ. ID. 4.

[0311] A protein component with a certain % sequence identity to an amino acid sequence described herein can be obtained for example by insertion, deletion, substitution and/or modification of at least one amino acid, but not more than 10%, not more than 9%, not more than 8%, not more than 7%, not more than 6%, not more than 5%, not more than 4%, not more than 3%, not more than 2%, not more than 1%, not more than 0.9%, not more than 0.8%, not more than 0.7%, not more than 0.6%, not more than 0.5%, not more than 0.4%, not more than 0.3%, not more than 0.2% or not more than 0.1% of the amino acids relative to the amino acid sequence SEQ. ID. 2, SEQ. ID. 4, SEQ. ID. 6, SEQ. ID. 8, SEQ. ID. 10, SEQ. ID. 12, SEQ. ID. 14, SEQ. ID. 18, SEQ. ID. 21, SEQ. ID. 22, and/or SEQ. ID. 26. Such an insertion, deletion, substitution and/or modification can be achieved based on a corresponding nucleotide acid sequence described herein that encodes the desired insertion, deletion, substitution and/or modification (for example a nucleotide acid sequence of a SARS-CoV-2 variant encoding for a mutated variant of a protein component described herein).

[0312] The insertion, deletion, substitution and/or modification can also be the result of a post-translational modification. In some embodiments, the protein component described herein is post-translationally modified to improve the production process. In some embodiments, the protein component described herein is post-translationally modified to improve at least one protein property of the protein component described, such as a protein property selected from the group of antigenicity, protein stability, pharmacokinetic, pharmacodynamic, interactions with drugs and interactions with adjuvants. In some embodiments, the protein component described herein is post-translationally modified by at least technique selected from the group of addition of functional groups, linked to other proteins or peptides, chemical modification of amino acids (e.g., citrullination, deamination, deamidation, eliminylation), disulfide bridges, cysteine amino acid linkeage, peptide bond cleavage, isoaspartate formation, racemization and protein splicing.

[0313] Thus, the amino acid sequences described herein do not necessarily have a proportional % sequence identity overlap as the nucleotide acid sequences described herein. In some embodiments, the amino acid sequence of the invention differs at least 10%, at least 9%, at least 8%, at least 7%, at least 6%, at least 5%, at least 4%, at least 3%, at least 2%, at least 1%, at least 0.9%, at least 0.8%, at least 0.7%, at least 0.6%, at least 0.5%, at least 0.4%, at least 0.3%, at least 0.2%, at least 0.1% more from the sequences described in SEQ. ID. 2, SEQ. ID. 4, SEQ. ID. 6, SEQ. ID. 8, SEQ. ID. 10, SEQ. ID. 12, SEQ. ID. 14, SEQ. ID. 18, SEQ. ID. 21, SEQ. ID. 22, and/or SEQ. ID. 26 than the altered nucleotide acid sequences differ from the nucleotide acid sequences described herein.

[0314] In some embodiments, the invention relates to the vaccine according to the invention comprising at least two molecularly precisely defined protein components selected from the group consisting of the protein components a, b1, b2, c1 or c2, d1 or d2, wherein
[0315] (i) the protein component a comprises
   [0316] a) the sequence according to SEQ. ID. 14 analogous to the S protein of SARS-CoV-2 or a sequence having at least 90%, having at least 91%, having at least 92%, having at least 93%, having at least 94%, having at least 95%, at least 96%, at least 97%, at least 98%, at least 99%, at least 99.1%, at least 99.2%, at least 99.3%, at least 99.4%, at least 99.5%, at least 99.6%, at least 99.7%, at least 99.8%, or at least 99.9% sequence identity to SEQ. ID. 14; or
   [0317] b) the sequence according to SEQ. ID. 18 analogous to the S protein of SARS-CoV-2 or a sequence having at least 90%, having at least 91%, having at least 92%, having at least 93%, having at least 94%, having at least 95%, at least 96%, at least 97%, at least 98%, at least 99%, at least 99.1%, at least 99.2%, at least 99.3%, at least 99.4%, at least 99.5%, at least 99.6%, at least 99.7%, at least 99.8%, or at least 99.9% sequence identity to SEQ. ID.18;
[0318] (ii) the protein component b1 comprises
   [0319] a) the sequence according to SEQ. ID. 6 analogous to the envelope protein E of SARS-CoV-2 or a sequence having at least 90%, having at least 91%, having at least 92%, having at least 93%, having at least 94%, having at least 95%, at least 96%, at least 97%, at least 98%, at least 99%, at least 99.1%, at least 99.2%, at least 99.3%, at least 99.4%, at least 99.5%, at least 99.6%, at least 99.7%, at least 99.8%, or at least 99.9% sequence identity to SEQ. ID.6; or
   [0320] b) the sequence according to SEQ. ID. 21 analogous to the envelope protein E of SARS-CoV-2 or a sequence having at least 90%, having at least 91%, having at least 92%, having at least 93%, having at least 94%, having at least 95%, at least 96%, at least 97%, at least 98%, at least 99%, at least 99.1%, at least 99.2%, at least 99.3%, at least 99.4%, at least 99.5%, at least 99.6%, at least 99.7%, at least 99.8%, or at least 99.9% sequence identity to SEQ. ID.21; and
   [0321] the protein component b2 comprises the sequence according to SEQ. ID. 8 analogous to the envelope protein E of MHV59A or an equivalent protein comprising a sequence having at least 90%, having at least 91%, having at least 92%, having at least 93%, having at least 94%, having at least 95%, at least 96%, at least 97%, at least 98%, at least 99%, at least 99.1%, at least 99.2%, at least 99.3%, at least 99.4%, at least 99.5%, at least 99.6%, at least 99.7%, at least 99.8%, or at least 99.9% sequence identity to SEQ. ID.8;
[0322] (iii) the protein component c1 comprises
   [0323] a) the sequence according to SEQ. ID. 10 analogous to the envelope protein E of SARS-CoV-2 or a sequence having at least 90%, having at least 91%, having at least 92%, having at least 93%, having at least 94%, having at least 95%, at least 96%, at least 97%, at least 98%, at least 99%, at least 99.1%, at least 99.2%, at least 99.3%, at least 99.4%, at least 99.5%, at least 99.6%, at least 99.7%, at least 99.8%, or at least 99.9% sequence identity to SEQ. ID. 10; or
   [0324] b) the sequence according to SEQ. ID. 22 analogous to the membrane protein M of SARS-CoV-2 or a sequence having at least 90%, having at least 91%, having at least 92%, having at least 93%, having at least 94%, having at least 95%, at least 96%, at least 97%, at least 98%, at least 99%, at least 99.1%, at least 99.2%, at least 99.3%, at least 99.4%, at least 99.5%, at least 99.6%, at least 99.7%, at least 99.8%, or at least 99.9% sequence identity to SEQ. ID.22; and
   [0325] the protein component c2 comprises the sequence according to SEQ. ID. 12 analogous to membrane protein M of MHV59A or an equivalent protein comprising a sequence having at least 90%, having at least 91%, having at least 92%, having at least 93%, having at least 94%, having at least 95%, at least 96%, at least 97%, at least 98%, at least 99%, at least 99.1%, at least 99.2%, at least 99.3%, at least 99.4%, at least 99.5%, at least 99.6%, at least 99.7%, at least 99.8%, or at least 99.9% sequence identity to SEQ. ID.12; and
[0326] (iv) the protein component d1 comprises
   [0327] a) the sequence according to SEQ. ID. 2 analogous to the nucleocapsid phosphoprotein N of SARS-CoV-2 or a sequence having at least 90%, having at least 91%, having at least 92%, having at least 93%, having at least 94%, having at least 95%, at least 96%, at least 97%, at least 98%, at least 99%, at least 99.1%, at least 99.2%, at least 99.3%, at least 99.4%, at least 99.5%, at least 99.6%, at least 99.7%, at least 99.8%, or at least 99.9% sequence identity to SEQ. ID. 2; or
   [0328] b) the sequence according to SEQ. ID. 26 analogous to the nucleocapsid phosphoprotein N of SARS-CoV-2 or a sequence having at least 90%, having at least 91%, having at least 92%, having at least 93%, having at least 94%, having at least 95%, at least 96%, at least 97%, at least 98%, at least 99%, at least 99.1%, at least 99.2%, at least 99.3%, at least 99.4%, at least 99.5%, at least 99.6%, at least 99.7%, at least 99.8%, or at least 99.9% sequence identity to SEQ. ID. 26; and the protein component d2 the sequence according to SEQ. ID. 4 analogous to the nucleocapsid phosphoprotein N of MHV59A or an equivalent protein comprising a sequence having at least 90%, having at least 91%, having at least 92%, having at least 93%, having at least 94%, having at least 95%, at least 96%, at least 97%, at least 98%, at least 99%, at least 99.1%, at least 99.2%, at least 99.3%, at least 99.4%, at least 99.5%, at least 99.6%, at least 99.7%, at least 99.8%, or at least 99.9% sequence identity to SEQ. ID. 4.
   [0329] In some embodiments, the invention relates to the vaccine according to the invention comprising at least two molecularly precisely defined protein components selected from the group consisting of the protein components a, b1, c1, and d1.

[0330] In some embodiments, the invention relates to the vaccine according to the invention comprising at least two molecularly precisely defined protein components selected from the group consisting of the protein components b1, c1, and d1.

[0331] In some embodiments, the invention relates to the vaccine according to the invention comprising at least two molecularly precisely defined protein components selected from the group consisting of the protein components a, c1, and d1.

[0332] In some embodiments, the invention relates to the vaccine according to the invention comprising at least two molecularly precisely defined protein components selected from the group consisting of the protein components a, b1, and d1.

[0333] In some embodiments, the invention relates to the vaccine according to the invention comprising at least two molecularly precisely defined protein components selected from the group consisting of the protein components a, b1, and c1.

[0334] In some embodiments, the invention relates to the vaccine according to the invention comprising at least two molecularly precisely defined protein components a and c1.

[0335] In some embodiments, the invention relates to the vaccine according to the invention comprising at least two molecularly precisely defined protein components a and d1.

[0336] In some embodiments, the invention relates to the vaccine according to the invention comprising at least two molecularly precisely defined protein components c1 and d1.

[0337] In some embodiments, the invention relates to the vaccine according to the invention comprising at least two molecularly precisely defined protein components a, and b1, c1, and d1.

[0338] In some embodiments, the invention relates to the vaccine according to the invention comprising at least three molecularly precisely defined protein components selected from the group consisting of the protein components a, b1, c1, and d1.

[0339] In some embodiments, the invention relates to the vaccine according to the invention comprising three molecularly precisely defined protein components selected from the group consisting of the protein components a, b1, c1, and d1.

[0340] The vaccine according to the invention comprising the protein components described herein can elicit a substantial and broad immune response. At the same time, the vaccine may be limited in replication capabilities, in that it does not replicate in the body of a subject. Such limited replication capabilities can for example be achieved by omitting or altering required sequences for efficient replication.

[0341] Accordingly, the invention is at least in part based on the discovery that a vaccine comprising the combination of protein components described herein, can show desired limitations in replication capabilities, while largely maintaining the antigenic potential.

[0342] Furthermore, the invention relates to a method for producing the vaccine comprising the successive steps of introducing at least one nucleic acid according to one of claims 1 to 10 into a biotechnological production unit, in particular a cell line, by means of transfection, starting from the nucleic acid-based mRNA, at least two of the protein components selected from the group consisting of the protein components a, b1, b2, c1, c2, d1 or d2 are prepared by translation and the protein components obtained thereof are purified.

[0343] In some embodiments, the invention relates to a method for the production of the vaccine according to the invention comprising the successive steps of
[0344] a) introducing the vector according to one of embodiments 10 to 14 into a biotechnological production unit, in particular a cell line, wherein, the nucleic acid-based mRNA coding for at least two of the protein components selected from the group consisting of the protein components a, b1, b2, c1, c2, d1 or d2 are prepared by translation;
[0345] b) obtaining protein components from the biotechnological production unit in step a); and
[0346] c) purifying the obtained protein components to obtain the vaccine according to the invention.

[0347] In some embodiments, the invention relates to a biotechnological production unit comprising at least one vector according to the invention.

[0348] The terms “biotechnological production unit” and “production organism” are used herein interchangeably and refer to at least one host cell into which the nucleic acid of the invention has been introduced for expression, including the progeny of such cells, organisms and biotechnological units that comprise such cells and/or progeny of such cells. Host cells include “transformants” and “transformed cells,” which include the primary transformed cell and progeny derived therefrom without regard to the number of passages. The progeny may not be completely identical in nucleic acid content to a parent cell but may contain mutations. Mutant progeny that have the same function or biological activity as screened or selected for in the originally transformed cell are included herein.

[0349] The term “amplifying biotechnological production unit” refers to any biotechnological production unit that allows amplification of large vectors (e.g., more than 4000 bases, more than 10000 bases, more than 35000 bases). In some embodiments, the amplifying biotechnological production unit described herein comprises a yeast cell.

[0350] In certain embodiments, the host cell is a stem cell. In other embodiments, the host cell is a differentiated cell.

[0351] The biotechnological production unit described herein is particularly useful, if it comprises a cell that allows viral entry of SARS-CoV-2, such that the product of cells of the biotechnological production unit can enter further cells of the biotechnological production unit. This subsequent infection of cells of the biotechnological production facilitates and accelerates the process of bringing the vector into the host cells.

[0352] In some embodiments, the biotechnological production unit described herein comprises a cell that allows viral entry of SARS-CoV-2. In some embodiments, the biotechnological production unit described herein comprises a cell that expresses the human ACE2 receptor or a functional human-like ACE2 receptor. The human-like ACE2 receptors that allow viral entry of SARS-CoV-2 are known to the person skilled in the art (see, e.g., Damas, J., et al., 2020, Proceedings of the National Academy of Sciences, 117(36), 22311-22322).

[0353] In some the biotechnological production unit described herein comprises at least one cell type selected from the group of HEK293, MDCK, Chinese hamster ovary (CHO), SF9, Vero, MRC 5, Per.C6, PMK, and WI-38.

[0354] In some embodiments, the biotechnological production unit described herein comprises a cell that is at least partially human or a cell of an at least partially human cell line.

[0355] In some embodiments, the biotechnological production unit described herein comprises a cell that allows the production of a viral particle comprising the nucleotide of the invention or the vector of the invention that is selectively replicable in it is fully replicable in cells of the biotechnological production unit but not or unsubstantially in cells of the human body. This selective replicability is achieved by cells that comprise complementary proteins for the replication of the viral particle (see e.g. Example).

[0356] In some embodiments, the biotechnological production unit described herein comprises a cell that can express at least one protein for viral replication. In some embodiments, the biotechnological production unit described herein comprises a cell that can express at least one protein component for viral replication that is not encoded in the nucleotide acid sequence of the invention or the vector of the invention.

[0357] Transduction of host cells by the vector of the invention can be achieved by stable or transient transduction (see, e.g., Stepanenko, A. A., and Heng, H. H., 2017, Mutation Research/Reviews in Mutation Research, 773, 91-103).

[0358] If DNA is introduced into the production unit according to a first embodiment, this is usually done using a plasmid suitable for this purpose.

[0359] Alternatively, the DNA may be introduced into the biotechnological production unit by any kind of vector.

[0360] If, on the other hand, RNA is introduced according to a second embodiment, a sequence coding for the RNA-dependent RNA polymerase (according to SEQ. ID. 30) is introduced in addition to the sequences coding for the protein components a, b1, b2, c1, c2, d1 or d2. This sequence makes it possible to first form a negative RNA strand from the positive RNA strand present as a template and then to produce the corresponding messenger RNA from it.

[0361] In the context of this second embodiment of the procedure, it is preferred that the vaccine obtained additionally comprises a fully synthetic, long-chain ribonucleic acid (according to SEQ. ID. 33 or 34), which is obtainable by enzymatic transcription.

[0362] In the context of this second embodiment of the procedure, it is also preferred that the vaccine obtained additionally comprises a fully synthetic, long-chain ribonucleic acid (according to SEQ. ID. 33 or 34), which is obtainable via the T7 transcription of the sequence according to SEQ. ID. 28.

[0363] “a,” “an,” and “the” are used herein to refer to one or to more than one (i.e., to at least one, or to one or more) of the grammatical object of the article.

[0364] “or” should be understood to mean either one, both, or any combination thereof of the alternatives.

[0365] “and/or” should be understood to mean either one, or both of the alternatives.

[0366] Throughout this specification, unless the context requires otherwise, the words “comprise”, “comprises” and “comprising” will be understood to imply the inclusion of a stated step or element or group of steps or elements but not the exclusion of any other step or element or group of steps or elements.

[0367] The terms “include” and “comprise” are used synonymously. “preferably” means one option out of a series of options not excluding other options. “e.g.” means one example without restriction to the mentioned example. By “consisting of” is meant including, and limited to, whatever follows the phrase “consisting of.” Reference throughout this specification to “one embodiment”, “an embodiment”, “a particular embodiment”, “a related embodiment”, “a certain embodiment”, “an additional embodiment”, “some embodiments”, “a specific embodiment” or “a further embodiment” or combinations thereof means that a particular feature, structure or characteristic described in connection with the embodiment is included in at least one embodiment of the present invention. Thus, the appearances of the foregoing phrases in various places throughout this specification are not necessarily all referring to the same embodiment. Furthermore, the particular features, structures, or characteristics may be combined in any suitable manner in one or more embodiments. It is also understood that the positive recitation of a feature in one embodiment, serves as a basis for excluding the feature in a particular embodiment.

[0368] The invention is further illustrated by the following design examples in combination with the attached figures, which do not limit the scope of the invention described in the claims.

### DESCRIPTION OF THE FIGURES

[0369] FIG. 1: Plasmid maps of the mono-cistronic expression plasmids coding for the nucleocapsid protein (N) (SEQ. ID. 35), envelope protein (E) (SEQ. ID. 36), membrane protein (M) (SEQ. ID. 37) and spike glycoprotein (S) (SEQ. ID. 38) of SARS-CoV2. The numbers on the inside the plasmid maps indicate the DNA coordinates in base-pairs. The protein-coding sequences of N, E, M and S are represented by arrows and stand for the DNA and protein sequences with the SEQ. ID. 1, 2, 3 and 4 (N), 5, 6, 7 and 8 (E), 9, 10, 11 and 12 (M), 13 and 14 (S) as set forth in the Sequence Listing.

[0370] FIG. 2: Genome map of the poly-cistronic expression construct COVAX191ΔN (SEQ. ID. 33 and 39) (upper figure) which, together with the mono-cistronic expression plasmid pcDNA34 syn N (SEQ. ID. 35) (lower figure) can be used for vaccine production in cell lines as shown in example 2. The numbers refer to the DNA coordinates in kilobases (K) for COVAX191ΔN and refer to the base-pair positions for the pcDNA34 syn N construct (SEQ. ID. 35). Protein-coding sequences of the polyprotein 1a and 1b, E, M S (upper figure) and the nucleocapsid protein syn N (lower figure) are represented by arrows.

[0371] FIG. 3: Agarose gel electrophoresis size separation of the mono-cistronic, plasmid-based expression constructs for the nucleocapsid protein (N), envelope protein (E), membrane protein (M) and the spike glycoprotein (S). The left side of the gel shows the MHV A59 (MHV) derived constructs for the nucleocapsid protein (N), envelope protein (E) and the membrane protein (M). The right side of the gel shows the derived constructs based on the SARS-CoV2 for the nucleocapsid protein (N), envelope protein (E), membrane protein (M) and the spike glycoprotein (S).

[0372] FIG. 4: Schematic illustration with the corresponding DNA sequencing cover graph of the circular 40,556 bp DNA construct COVAX191ΔN (SEQ. ID. 40) (upper figure) and the 38,383 bp DNA construct COVAX191ΔNΔHE (SEQ. ID. 40) (lower figure). The arrows indicate the positions of the protein-coding sequences for the recoded CDS of the replicative polyproteins 1A and 1B (1A,1B), the hemagglutinin esterase (HE), the spike glycoprotein (S), the envelope protein (E) and the membrane protein (M). The complete genomes of COVAX191ΔN and COVAX191ΔNΔHE were assembled from 6 synthetic DNA blocks using a single lithium acetate yeast transformation and selected for the auxotrophic URA3 marker.

[0373] FIG. 5: Schematic illustration of the SARS-CoV-2 genome and the deletion variants generated.

[0374] Table S1: DNA assembly efficiency of COVAX191 in S. cerevisiae (yeast)

### EXAMPLES

[0375] The following examples illustrate how the inventive long-chain nucleic acids encoding for the envelope proteins E, M, N and S are produced and used in a biotechnological process to stimulate cells to produce corona virus envelopes or fragments thereof.

[0376] For the production, the (digital) sequences according to the present invention are transferred into the corresponding physically present long-chain fully synthetic nucleic acid molecules by the process of chemical DNA synthesis.

### Example 1

[0377] In the first example, the resulting long-chain, fully synthetic nucleic acids encoding the envelope proteins E, M, N and S are mono-cistronic, i.e. they are produced under the control of a separate promoter (SV40, CMV, EF-1, chicken β actin promoter or hybrid promoters) and other optional translation initiation signals (Kozak consensus sequence) and nuclear mRNA export signals (Chuck Wood sequence) into expression plasmids for eukaryotic cells. The sequences as revealed in SEQ. ID. 35, SEQ. ID. 36, SEQ. ID. 37 and SEQ. ID. 38, and FIG. 1 shall serve as an example of such an expression system. Other embodiments with other expression plasmids, the corresponding resistance genes and promoters are possible and are known to the person skilled in the art.

[0378] The resulting 4 expression plasmids are amplified in Escherichia coli, purified by standard chemical-physical procedures and then introduced by transfection into a eukaryotic cell line (HEK293, Chinese hamster ovary (CHO), SF9, Vero). Transfection is performed by standard procedures such as calcium phosphates, lipofection, electroporation.

[0379] After transfection, the cells, starting from the transfected plasmid DNA, begin to translate the messenger RNA (mRNA), from which the envelope proteins E, M, N and S are expressed by translation. These proteins spontaneously assemble in the cells to form corona virus envelopes and are then released by the cells by exocytosis into the culture medium, where they accumulate after 5-7 days.

[0380] Chemical-physical processes are used for the purification of envelope proteins, virus envelopes and their fragments. For this purpose, the cell culture supernatant is separated from the cells by centrifugation. In the subsequent step, the virus envelopes are further purified from impurities and other components of the culture medium by chromatographic column separation methods. The material thus obtained in its pure form, consisting of the coronavirus envelopes, forms the basis of the vaccine, which is then converted into various forms for administration depending on the type of application. Typically, an adjuvant is used for this purpose, stabilizers to improve the shelf-life, salts and buffers. The vaccines are thus the product of the long-chain, fully synthetic nucleic acids described here.

### Example 2

[0381] In the second example, the long-chain, fully synthetic nucleic acids encoding the envelope proteins E, M and S are expressed together with a fully synthetic nucleic acid encoding the RNA-dependent RNA polymerase. In this poly-cistronic expression system as revealed by the sequences SEQ. ID. 39 and SEQ. ID. 40 and shown in FIG. 2, the envelope proteins E, M and S are directly transcribed from a negative RNA strand, including the RNA-dependent RNA polymerase. If not all classes of envelope proteins of the sequence groups A-D are expressed RNA-dependent, additional expression plasmids as described in example 1 can be used to express the complete set of envelope proteins for the biotechnological production of virus envelopes in cell lines. In example 2, the expression plasmid coding for the N protein is used for this purpose (SEQ. ID. 35) (see FIG. 2).

[0382] The purification of the plasmids, the transfection of the long-chain nucleic acids, as well as the purification of the virus envelopes, largely follows the process sequence described in example 1. However, the process includes an additional step in which the long-chain nucleic acid, as described in SEQ. ID. 39 and SEQ. ID. 40, is transformed by a T7 RNA polymerase into the corresponding RNA form according to SEQ. ID. 33 and SEQ. ID. 34 before transfection. This positive RNA strand leads to the production of the RNA-dependent RNA polymerase in the cell line, which produces a negative RNA strand from it. Transcription of the messenger RNA (mRNA) from this negative RNA strand then takes place, which leads to the production and assembly of the envelope proteins in virus envelopes.

[0383] The vaccine produced in this way differs from the vaccine described in the first example 1 in that, in addition to the envelope proteins obtained through the gene expression of the corresponding deoxyribonucleic acid, it contains a fully synthetic, long-chain ribonucleic acid which is expressed via the T7 transcription of the sequences SEQ. ID. 39 and SEQ. ID. 40.

[0384] The second example 2 has the advantage over the first application example that it produces virus envelopes that multiply themselves in a helper cell line expressing the N protein. This is possible because the virus envelopes formed in this way additionally contain a positive RNA strand that codes for the RNA-dependent RNA polymerase and the envelope proteins E, M and S. If these virus envelopes are taken up by a cell, the cell itself is stimulated to produce virus envelopes. If the cell expresses the N protein episomally, which is the case for the vaccine production cell line, self-replicating virus envelopes are formed. This simplifies the production process and can be done without expensive transfection reagents. If the target cell does not express any N-protein, virus envelopes are also formed from it, but then they are devoid of a packaged RNA strand and can no longer self-replicate. These virus envelopes have the same chemical/physical structure and the same antigenicity as virus envelopes produced by the manufacturing process shown in example 1. Example 2 allows the production of virus envelopes, fragments and virus envelope proteins in further helper cell lines and production organisms as well as the direct application as RNA vaccine.

### Methods:

### Cultivation of Bacteria and Yeast Strains

[0385] Escherichia coli (E. coli) DH5alpha was cultivated in Luria-Broth (LB) at 37° C. Saccharomyces cerevisiae VL6-48N (Kouprina et al. 2006 Methods in Mol. Biol. 349, 85-101) was cultivated either in yeast peptone-dextrose (YPD) medium or synthetic dropout (SD) medium without uracil at 30° C.

### Sequence Design and De-Novo DNA Synthesis.

[0386] DNA sequences for mono-cistronic and poly-cistronic expression constructs were assembled from sequence parts disclosed in the attached sequence list (SEQ. ID. 1 to 40). Synthesis restrictions were removed computationally by synonymous codon replacement and application of the desired base substitutions within intergenic sequences. To define the optimal retro-synthetic assembly route, the synthesis-optimized DNA designs were hierarchically divided into smaller DNA fragments suitable for low-cost synthesis by commercial suppliers. The partitioning strategy was designed as a four-step, hierarchical assembly process. Sub-blocks with a size of 1.4 kb (kilobases) were assembled to blocks of 5.4 kb and further assembled to segments with a size of 16 kb and then into the final COVAX constructs of 35 to 40 kb. The linear DNA assembly parts have homology overlaps at the ends and nested 3′ prefix and 5′ suffix sequences to integrate assembled DNA parts into vectors and allow hierarchical assembly of the final COVAX DNA designs. The DNA assembly parts were obtained from commercial suppliers by low-cost DNA synthesis as sequence-verified, clonal plasmid constructs and double-stranded linear DNA.

### Production of the Mono-Cistronic Expression Constructs:

[0387] The synthetic nucleic acid sequences covering the complete protein-coding sequences of the S-protein of SARS-2 CoV, the M-protein, the N-protein and the E-protein of SARS-CoV-2 or MHV were amplified by polymerase amplification techniques (PCR) from sequence-verified synthetic DNA. Translation initiation sites before the start codon were introduced by oligonucleotide primers. The PCR products were separated by agarose gel electrophoresis according to their molecular weight and then purified over a nucleospin column (NucleoSpin Gel and PCR Clean-up Kit, Macherey nail). PCR products were cloned into the pcDNA3.4 vector using the Topo-TA cloning kit (TOPO-TA cloning kit, ThermoFisher). The molecular weight of the plasmids was determined by agarose gel electrophoresis (FIG. 3) and the DNA sequence was checked by Sanger sequencing.

### Production of the Poly-Cistronic COVAX DNA Constructs:

[0388] The DNA assembly parts for the poly-cistronic COVAX DNA constructs were released from plasmids by restriction digestion using the Type IIS restriction enzymes (BbsI, BspQI, Pac and Pmel (New England Biolabs)). Equimolar amounts of DNA inserts (100 ng, 0.115 pmol) and linearized vector pXMCS2 (100 ng, 0.038 pmol) were incubated together with T5 exonuclease, phusion polymerase and Taq DNA ligase for one hour at 50° C. After isothermal assembly, the constructs were electroporated into E. coli DH5alpha cells (BioRad MiniPulser). The cells were incubated in LB medium for one hour and then plated out on LB plates. Segments and complete COVAX construct were assembled from blocks by yeast recombination using the plasmid pMR10Y (pMR10::CEN/ARS::URA3, Christen et al. 2015, ACS Synthetic Biology, 4, 927-934) according to the lithium acetate transformation method (Gietz et al 2007, Nature Protocols, 2, 31-34). Saccharomyces cerevisiae VL6-48N was grown overnight in 5 ml YPD, diluted 1:20 in 50 ml YPD and incubated for 4 h. The cells were collected by centrifugation at 1,000 rcf for 5 min, washed with 25 ml distilled water and centrifuged at 3,000 rcf for 5 min. The pellet was dissolved in 1 ml lithium acetate mixture (0.1 M lithium acetate, 0.01 M Tris-HCl, pH 7.5, 0.001 M EDTA, pH 8.0). Next, 100 μl single-stranded salmon sperm DNA (1% w/v salmon sperm DNA (ssDNA), 0.01 M Tris-HCl, pH 7.5, 0.001 M EDTA, pH 8.0) and 6 ml PEG-mix (40% w/v poly (ethylene glycol) 3015-3685 g/mol, 0.01 M Tris-HCl, pH 7.5, 0.001 M EDTA, pH 8.0) were added. From the PEG cell mix, 710 μl aliquots were combined with 100 ng of digested DNA blocks and 250 ng of linearized pMR10Y vector (Pac, Pmel). The samples were incubated for 30 minutes at 30° C. After incubation, 70 μl dimethyl sulfoxide (DMSO) was added and the samples were subjected to heat shock at 42° C. for 15 minutes. The cells were collected by centrifugation at 1000 rcf for 2 minutes and then plated out on SD plates without uracil and cultivated at 30° C. for three days until colonies became visible (see table S1).

### Sequence Verification of the COVAX DNA Constructs.

[0389] Sequence verification of the assembled DNA constructs was performed on an iSeq instrument (Illumina) using the Nextera DNA Flex Library Prep-Kit. Genomic DNA of ura+yeast transformants was fragmented and processed according to the tagging protocol as specified by the manufacturer. Sequences were calculated de novo from the read sequences and the created contigs were compared with the reference sequences using the CLC Genomics Workbench software (Quiagen). The complete assembly of COVAX191ΔN and COVAX191ΔHEN was confirmed with a completely closed sequence coverage plot (FIG. 4).

### Example 3

[0390] Yeast clones each containing one of the circular sequences (viral sequences, T7 promoter and polyA-signal as well as vector, all together in one yeast artificial chromosome or “YAC”) were be grown, harvested and the YACs extracted thereof. The so-obtained YAC were cut with the restriction enzyme Eagl, leading to a double-stranded DNA molecule linearized directly after the polyA-signal. After making these DNA molecules RNase-free by standard treatment with Proteinase K followed by Trizol (phenol/chloroform) extraction, single-stranded RNA corresponding to the vaccine virus genome were obtained by in vitro transcription using T7 polymerase. The so obtained RNA were transfected into suitable cell lines (HEK293T or Vero cells). In the case of the positive control, the full-length construct “GBsyn_V33” unaltered HEK293 or Vero cells supported the replication of the RNA genome, the generation of subgenomic mRNAs and hence translation into viral proteins. These, together with the positive-strand RNA genome, and components from the cell membrane, formed progeny viruses, in this case wild-type, natural SARS-CoV-2 viruses. In the case of the deletion mutants, the gene or genes deleted in the virus genome are transfected into the cell lines in the form of DNA, leading to the transient expression of the protein or proteins, and thereby providing the missing factor required for enabling the generation of progeny virus. Alternatively (and preferred), cultivation of those cells under selection pressure lead to the stable integration of the gene or the genes into the cell genome, from where the protein or proteins are continuously expressed (with expression we understand the generation of mRNA from the gene and the subsequent translation into proteins). Such cells, either transiently or stably expressing the proteins made from the genes missing in the vaccine virus genome, enable a continuous production of vaccine viruses, characterized by a full set of structural proteins and a vaccine virus genome having one or several genes deleted. The so obtained vaccine viruses were purified in a so-called downstream processing (DSP) process characterized by clarification (separation of cells from the vaccine viruses), DNA digestion by Benzoase, Ultra Filtration/Dia Filtration (“UF/DF”) and finally sterile filtration (0.22 μm filtration).

1. A fully synthetic, long-chain nucleic acid with at least 4,000 bases, characterized in that the nucleic acid
comprises at least two of the four sequence parts A-D in any arrangement, wherein
i) Sequence part A comprises
a) a sequence as defined in SEQ ID NO: 50 or a sequence having at least 98.5% sequence identity to the sequence as defined in SEQ ID NO: 50; or b) a sequence as defined in SEQ ID NO: 3;
ii) Sequence part B comprises
a) a sequence as defined in SEQ ID NO: 48 or a sequence having at least 98.3% sequence identity to the sequence as defined in SEQ ID NO: 48; or b) a sequence as defined in SEQ ID NO: 7;
iii) Sequence part C comprises
a) a sequence as defined in SEQ ID NO: 49 or a sequence having at least 97.2% sequence identity to the sequence as defined in SEQ ID NO: 49; or b) a sequence as defined in SEQ ID NO: 11;
iv) Sequence part D comprises a sequence as defined in SEQ ID NO: 17 or a sequence having at least 98.5% sequence identity to the sequence as defined in SEQ ID NO: 17; or
encompasses a ribonucleic acid sequence corresponding to the deoxyribonucleic acid sequence according to the sequence parts A-D.

2. The nucleic acid according to claim 1, characterized in that it has at least-8O 9 8,000 bases, optionally at least 20,000 bases, in a defined sequence.

3. The nucleic acid according to claim 1, wherein the nucleic acid additionally comprises
a) 1.) an ORF lab sequence as set forth in SEQ ID NO: 51 or a sequence having at least 98.5% sequence identity to SEQ ID NO: 51; or
2.) i) an ORF1b sequence as set forth in SEQ ID NO: 59; or a sequence having at least 98.5% 98.5% sequence identity to SEQ ID NO: 59; and
ii) a n ORF1a sequence as set forth in SEQ ID NO: 58 or a sequence having at least 98.6% sequence identity to SEQ. ID. 58;
b) an ORF3a sequence as set forth in SEQ ID NO: 52 or a sequence having at least 99% sequence identity to SEQ ID NO: 52; and
c) an ORF7a sequence as set forth in SEQ ID NO: 54 or a sequence having at least 99.5% sequence identity to SEQ ID NO: 54.

4. The nucleic acid according to claim 3, wherein the nucleic acid additionally comprises
a) an ORF6 sequence as set forth in SEQ ID NO: 53 or a sequence having at least 94.1% sequence identity to SEQ ID NO: 53; and/or
b) an ORF8 sequence as set forth in SEQ ID NO: 55 or a sequence having at least 99% sequence identity to SEQ ID NO: 55.

5. The nucleic acid according to claim 1, characterized in that sequence parts A to C correspond to the sequence according to SEQ ID NO: 19 or the corresponding ribonucleic acid sequence.

6. The nucleic acid according to claim 1, characterized in that the nucleic acid comprises in any arrangement at least three of the four sequence parts A-D or at least three of four sequence parts with a ribonucleic acid sequence corresponding to the deoxyribonucleic acid sequence according to the sequence parts A-D.

7. The nucleic acid according to claim 1, characterized in that the nucleic acid comprises in any arrangement the four sequence parts A-D or four sequence parts with a ribonucleic acid sequence corresponding to the deoxyribonucleic acid sequence according to the sequence parts A-D.

8. The nucleic acid according to claim 1, characterized in that the nucleic acid additionally comprises at least one sequence consisting of
SEQ ID NO: 15,
SEQ ID NO: 28
SEQ ID NO: 29;
SEQ ID NO: 30;
or the corresponding ribonucleic acid sequence.

9. The nucleic acid according to claim 1, characterized in that it has a maximum size of 200,000 to 1,000,000 bases.

10. A vector comprising the nucleic acid according to claim 1.

11. The vector according to claim 10, wherein the vector comprises the sequences set forth in SEQ ID NO: 46 and SEQ ID NO: 47.

12. The vector according to claim 10, wherein the vector is a plasmid vector.

13. A kit comprising two or more nucleic acids according to claim 1.

14. The kit according to claim 13, wherein the nucleic acids are present in at least one plasmid, optionally in two or more plasmids.

15. A biotechnological production unit comprising at least one vector according to claim 10.

16. A virus envelope, a fragment of a virus envelope and/or virus envelope protein obtainable by gene expression using at least one nucleic acid according to claim 1, wherein the virus envelope, the fragment of a virus envelope and/or the virus envelope protein package the at least one nucleic acid.

17. A vaccine against coronavirus SARS-CoV-2 comprising at least one nucleic acid according to claim 1 and products obtainable by gene expression using at least one nucleic acid in a production organism, optionally comprising a virus envelope, a fragment of a virus envelope and/or a virus envelope protein packaging the at least one nucleic acid.

18. The vaccine according to claim 17 comprising at least two molecularly precisely defined protein components selected from the group consisting of protein components a, b1, b2, d, c2, d1, and d2, wherein
(i) the protein component a comprises
a) the sequence according to SEQ ID NO: 14 analogous to the S protein of SARS-CoV-2 or a sequence having at least 90% sequence identity to SEQ ID NO: 14; or
b) the sequence according to SEQ ID NO: 18 analogous to the S protein of SARS-CoV-2 or sequence having at least 90% sequence identity to SEQ ID NO: 18;
(ii) the protein component b1 comprises
a) the sequence according to SEQ ID NO: 6 analogous to the envelope protein E of SARS-CoV-2 or a sequence having at least 90% sequence identity to SEQ ID NO: 6; or
b) the sequence according to SEQ ID NO: 21 analogous to the envelope protein E of SARS-CoV-2 or a sequence having at least 90% sequence identity to SEQ ID NO: 21; and
(iii) the protein component b2 comprises the sequence according to SEQ ID NO: 8 analogous to the envelope protein E of MHV59A or an equivalent protein comprising a sequence having at least 90% sequence identity to SEQ ID NO: 8;
(iv) the protein component d comprises
a) the sequence according to SEQ ID NO: 10 analogous to the envelope protein M of SARS-CoV-2 or a sequence having at least 90% sequence identity to SEQ ID NO: 10; or
b) the sequence according to SEQ ID NO: 22 analogous to the membrane protein M of SARS-CoV-2 or a sequence having at least 90% sequence identity to SEQ ID NO: 22;
(v) the protein component c2 comprises the sequence according to SEQ ID NO: 12 analogous to membrane protein M of MHV59A or an equivalent protein comprising a sequence having at least 90% sequence identity to SEQ ID NO: 12;
(vi) the protein component d1 comprises
a) the sequence according to SEQ ID NO: 2 analogous to the nucleocapsid phosphoprotein N of SARS-CoV-2 or a sequence having at least 90% sequence identity to SEQ ID NO: 2; or
b) the sequence according to SEQ ID NO: 26 analogous to the nucleocapsid phosphoprotein N of SARS-CoV-2 or a sequence having at least 90% sequence identity to SEQ ID NO: 26; and
(vii) the protein component d2 the sequence according to SEQ ID NO: 4 analogous to the nucleocapsid phosphoprotein N of NMV59A or an equivalent protein comprising a sequence having at least 90% sequence identity to SEQ ID NO: 4.

19. A method for production of a vaccine against coronavirus SARS-CoV-2 comprising the successive steps of
a) introducing the nucleotide acid sequence according to claim 1 into a biotechnological production unit, optionally a cell line,
wherein at least two of the protein components selected from the group consisting of the protein components a, b1, b2, c1, c2, d1, and d2 are produced therein by translation;
b) obtaining the at least two protein components from the biotechnological production unit in step a); and
c) purifying the at least two protein components from step b) to obtain the vaccine against the coronavirus SARS-CoV-2.

20. A method for production of a vaccine against coronavirus SARS-CoV-2 comprising a virus envelope, a fragment of a virus envelope and/or a virus envelope protein, the method comprising the successive steps of:
a) introducing the nucleotide acid sequence according to claim 1 into a biotechnological production unit, wherein the biotechnological production unit comprises a nucleic acid coding for at least one protein component selected from the group consisting of protein components a, b1, b2, c1, c2, d, d1, and d2;
b) obtaining a fragment of a virus envelope and/or virus envelope protein from the biotechnological production unit in step a); and
c) purifying the at least one fragment of a virus envelope and/or virus envelope protein of step b) to obtain the vaccine against the coronavirus SARS-CoV-2.

21. A method for production of a vaccine against coronavirus SARS-CoV-2 comprising the successive steps of:
a) introducing the vector according to claim 10 into an amplifying biotechnological production unit;
b) amplifying the nucleotide acid in the amplifying biotechnological production unit;
c) obtaining the nucleotide acid amplified in step b);
d) obtaining the vaccine against the coronavirus SARS-CoV-2 using a method comprising the steps of:
i) introducing the nucleotide acid amplified in step b) into a biotechnological production unit, optionally a cell line,
wherein at least two of the protein components selected from the group consisting of the protein components a, b1, b2, c1, c2, d1, and d2 are produced therein by translation;
ii) obtaining the at least two protein components from the biotechnological production unit in step a); and
iii) purifying the at least two protein components from step b) to obtain the vaccine against the coronavirus SARS-CoV-2.

The application's sequence listing, which the Patent Office published only in electronic form, follows.

SEQUENCE LISTING (59 sequences)

SEQ ID NO: 1 - DNA, 1263 bp, Artificial Sequence
  COVAX192_N
atggtgtctgataatggacctcaaaatcagcgaaatgcacctcgcattacgtttggtggaccatcagattcaactggcagtaaccagaatggagaacgaagtggtgcgcgatcaaaacaacgccgcccgcaaggtttacccaataatactgcgtcttggttcaccgctctcactcaacatggcaaggaagatttaaaattccctcgaggacaaggcgttccaattaacaccaatagcagtccagatgaccaaattggctactaccgccgcgccacaagacgaattcgtggtggtgatggtaaaatgaaagatctcagtccaagatggtatttctactatctaggaactgggccagaagctggacttccttatggtgctaacaaagatggcatcatatgggttgcaactgagggagccttgaatacaccaaaagatcacattggcaccagaaatcctgctaacaatgctgcaatcgtgctacaacttcctcaaggaacaacattaccaaaaggtttttacgcagaagggtctagaggtggaagtcaagcctcttctagatcatcatcacgtagtcgcaacagttcaagaaattcaactccaggttcaagtagaggaacttctcctgctagaatggctggaaatggaggtgatgctgctcttgctttgttactacttgacagattgaaccagcttgagagcaaaatgtctggtaaaggccaacaacaacaaggccaaactgtcactaagaaatctgctgctgaggcttctaagaagcctagacaaaaacgtactgccactaaagcatacaatgtaacacaagctttcggcagacgtggtccagaacaaactcaaggaaattttggggatcaggaactaatcagacaaggaactgattacaaacattggccgcaaattgcacaatttgctccttctgcttcagcgttctttggaatgtcgagaattggaatggaagtcacaccttcgggaacatggttgacctatacaggtgccatcaaattggatgacaaagatccaaatttcaaagatcaagtcattttgctgaataagcatattgacgcatacaaaacattcccaccaacagagcctaaaaaggacaaaaagaagaaggctgatgaaactcaagccttaccgcagagacagaagaaacagcaaactgtgactcttcttcctgctgcagatttggatgatttctccaaacaattgcaacaatccatgagcagtgctgactcaactcaggcctaa

SEQ ID NO: 2 - protein, 420 aa, Artificial Sequence
  Synthetic_Nucleocapsid_Protein_Sars-CoV2
MVSDNGPQNQRNAPRITFGGPSDSTGSNQNGERSGARSKQRRPQGLPNNTASWFTALTQHGKEDLKFPRGQGVPINTNSSPDDQIGYYRRATRRIRGGDGKMKDLSPRWYFYYLGTGPEAGLPYGANKDGIIWVATEGALNTPKDHIGTRNPANNAAIVLQLPQGTTLPKGFYAEGSRGGSQASSRSSSRSRNSSRNSTPGSSRGTSPARMAGNGGDAALALLLLDRLNQLESKMSGKGQQQQGQTVTKKSAAEASKKPRQKRTATKAYNVTQAFGRRGPEQTQGNFGDQELIRQGTDYKHWPQIAQFAPSASAFFGMSRIGMEVTPSGTWLTYTGAIKLDDKDPNFKDQVILLNKHIDAYKTFPPTEPKKDKKKKADETQALPQRQKKQQTVTLLPAADLDDFSKQLQQSMSSADSTQA

SEQ ID NO: 3 - DNA, 1368 bp, Artificial Sequence
  COVAX191_N
atggtgtcttttgttcctgggcaagaaaatgccggtggcagaagctcctctgtaaaccgcgctggtaatggaatcctcaagaaaaccacttgggctgaccaaaccgagcgtggaccaaataatcaaaatagaggcagaaggaatcagccaaagcagactgcaactactcaacccaactccgggagtgtggttccccattactcctggttttctggcattacccagttccaaaagggaaaggagtttcagtttgcagaaggacaaggagtgcctattgccaatggaatccccgcttcagagcaaaagggatattggtatagacacaaccgccgttcttttaaaacacctgatgggcagcagaagcaattactgcccagatggtatttttactatcttggcacagggccccatgctggagccagttatggagacagcattgaaggcgtcttttgggttgcaaacagccaagcggacaccaatacccgctctgatattgtcgaaagggacccaagcagtcatgaggctattcctactaggtttgcgcccggcacggtattgcctcagggcttttatgttgaaggctctggaaggtctgccccggccagccgatctggttcgcggtcacaatcccgtgggccaaataatcgcgctagaagcagttccaaccagcgccagcctgcctctactgtaaaacctgatatggccgaagaaattgctgctcttgttttggctaagctcggtaaagatgccggccagcccaagcaagtaacgaagcaaagtgccaaagaagtcaggcagaaaattttaaacaagcctcgccaaaagaggactccaaacaagcagtgcccagtgcagcagtgttttggaaagagaggccccaatcagaattttggaggctctgaaatgttaaaacttggaactagtgatccacagttccccattcttgcagagttggctccaacagttggtgccttcttctttggatctaaattagaattggtcaaaaagaattctggtggtgctgatgaacccaccaaagatgtgtatgagctgcaatattcaggtgcagttagatttgatagtactctacctggttttgagactatcatgaaagtgttgaatgagaatttgaatgcctaccagaaggatggtggtgcagatgtggtgagcccaaagccccaaagaaaagggcgtagacaggctcaggaaaagaaagatgaagtagataatgtaagcgttgcaaagcccaaaagctctgtgcagcgaaatgtaagtagagaattaaccccagaggatagaagtctgttggctcagatccttgatgatggcgtagtgccagatgggttagaagatgactctaatgtgtaa

SEQ ID NO: 4 - protein, 455 aa, Artificial Sequence
  Synthetic_Nucleocapsid_Protein_MHV
MVSFVPGQENAGGRSSSVNRAGNGILKKTTWADQTERGPNNQNRGRRNQPKQTATTQPNSGSVVPHYSWFSGITQFQKGKEFQFAEGQGVPIANGIPASEQKGYWYRHNRRSFKTPDGQQKQLLPRWYFYYLGTGPHAGASYGDSIEGVFWVANSQADTNTRSDIVERDPSSHEAIPTRFAPGTVLPQGFYVEGSGRSAPASRSGSRSQSRGPNNRARSSSNQRQPASTVKPDMAEEIAALVLAKLGKDAGQPKQVTKQSAKEVRQKILNKPRQKRTPNKQCPVQQCFGKRGPNQNFGGSEMLKLGTSDPQFPILAELAPTVGAFFFGSKLELVKKNSGGADEPTKDVYELQYSGAVRFDSTLPGFETIMKVLNENLNAYQKDGGADVVSPKPQRKGRRQAQEKKDEVDNVSVAKPKSSVQRNVSRELTPEDRSLLAQILDDGVVPDGLEDDSNV

SEQ ID NO: 5 - DNA, 231 bp, Artificial Sequence
  COVAX192_E
atggtgtactcattcgtttcggaagagacaggtacgttaatagttaatagcgtacttctttttcttgctttcgtggtattcttgctagttacactagccattcttactgcgcttcgattgtgtgcgtactgttgcaatattgttaacgtgagtcttgtaaaaccttctttttacgtttactctcgtgttaaaaatctgaattcttctcgggttcctgatcttctggtctaa

SEQ ID NO: 6 - protein, 76 aa, Artificial Sequence
  Synthetic_Envelope_Protein_Sars-CoV2
MVYSFVSEETGTLIVNSVLLFLAFVVFLLVTLAILTALRLCAYCCNIVNVSLVKPSFYVYSRVKNLNSSRVPDLLV

SEQ ID NO: 7 - DNA, 255 bp, Artificial Sequence
  COVAX191_E
atggtgtttaatttattccttacagacacagtatggtatgtggggcagattatttttatattcgcagtgtgtttgatggtcaccataattgtggttgccttccttgcgtctatcaaactttgtattcaactttgcggtttatgtaatactttggtgctgtccccttctatttatttgtatgataggagtaagcagctttataagtactataatgaagaaatgagactgcccctattagaggtggatgatatctaa

SEQ ID NO: 8 - protein, 84 aa, Artificial Sequence
  Synthetic_Envelope_Protein_MHV
MVFNLFLTDTVWYVGQIIFIFAVCLMVTIIVVAFLASIKLCIQLCGLCNTLVLSPSIYLYDRSKQLYKYYNEEMRLPLLEVDDI

SEQ ID NO: 9 - DNA, 672 bp, Artificial Sequence
  COVAX192_M
atggtggcagattccaacggtactattaccgttgaggagctgaaaaagctccttgaacaatggaacctagtaataggtttcctattccttacatggatttgcctgctgcaatttgcctatgccaacaggaataggtttttgtacatcattaagttgattttcctctggctgttatggccagtaactttagcttgttttgtgcttgctgctgtttacagaataaattggatcaccggtggaattgctattgcaatggcttgtcttgtaggattgatgtggctaagctacttcattgcttctttcagactgtttgcgcgtacgcgttccatgtggtcattcaatccagaaactaacattcttctcaacgtgccactccatggaactattctgactagaccgcttctagaaagtgaactcgtaatcggagctgttatccttcgtggacatcttcgtattgctggacatcatctaggacgctgtgacatcaaggatctacctaaagaaatcactgttgctacatcacgaacgctttcttattacaaattgggagcttcacagcgtgtagcaggtgattcaggttttgctgcatatagtcgctacaggattggcaactataaattaaacacagaccattccagtagcagtgacaatattgctttgcttgtacagtaa

SEQ ID NO: 10 - protein, 223 aa, Artificial Sequence
  Synthetic_Membrane_Protein_Sars-CoV2
MVADSNGTITVEELKKLLEQWNLVIGFLFLTWICLLQFAYANRNRFLYIIKLIFLWLLWPVTLACFVLAAVYRINWITGGIAIAMACLVGLMWLSYFIASFRLFARTRSMWSFNPETNILLNVPLHGTILTRPLLESELVIGAVILRGHLRIAGHHLGRCDIKDLPKEITVATSRTLSYYKLGASQRVAGDSGFAAYSRYRIGNYKLNTDHSSSSDNIALLVQ

SEQ ID NO: 11 - DNA, 690 bp, Artificial Sequence
  COVAX191_M
atggtgagtagtactactcaggccccagagcccgtctatcaatggaccgccgacgaggcagttcaattccttaaggaatggaacttctcgttgggcattatactactctttattactatcatactacagttcggttacacgagccgtagcatgtttatttatgttgtgaaaatgataatcttgtggttaatgtggccactgactattgttttgtgtattttcaattgcgtgtatgcgctaaataatgtgtatcttggattttctatagtgtttactatagtgtccattgtaatctggatcatgtattttgtgaacagcataaggttgtttatcaggactggtagctggtggagcttcaaccccgaaacaaacaaccttatgtgtatagatatgaaaggtaccgtgtatgttagacccattattgaggattaccatacactaacagccactattattcgtggccacctctacatgcaaggtgttaagctaggcaccggtttctctttgtctgacttgcccgcttatgttacagttgctaaggtgtcacacctttgcacttataagcgcgcattcttagacaaggtagacggtgttagcggttttgctgtttatgtgaagtccaaggtcggaaattaccgactgccctcaaacaaaccgagtggcgcggacaccgcattgttgagaacctaa

SEQ ID NO: 12 - protein, 229 aa, Artificial Sequence
  Synthetic_Membrane_Protein_MHV
MVSSTTQAPEPVYQWTADEAVQFLKEWNFSLGIILLFITIILQFGYTSRSMFIYVVKMIILWLMWPLTIVLCIFNCVYALNNVYLGFSIVFTIVSIVIWIMYFVNSIRLFIRTGSWWSFNPETNNLMCIDMKGTVYVRPIIEDYHTLTATIIRGHLYMQGVKLGTGFSLSDLPAYVTVAKVSHLCTYKRAFLDKVDGVSGFAVYVKSKVGNYRLPSNKPSGADTALLRT

SEQ ID NO: 13 - DNA, 3885 bp, Artificial Sequence
  SARS-CoV-2 S
atggtgtttgtttttcttgttttattgccactagtctctagtcagtgtgttaatcttacaatggtgtttgtttttcttgttttattgccactagtctctagtcagtgtgttaatcttacaaccagaactcaattaccccctgcatacactaattctttcacacgtggtgtttattaccctgacaaagttttcagatcctcagttttacattcaactcaggacttgttcttacctttcttttccaatgttacttggttccatgctatacatgtctctgggaccaatggtactaagaggtttgataaccctgtcctaccatttaatgatggtgtttactttgcttccactgagaagtctaacataataagaggctggatttttggtactactttagattcgaaaacccagtccctacttattgttaataacgctactaatgttgttatcaaagtctgtgaatttcaattttgtaacgatccatttttgggtgtttattaccacaaaaacaacaaaagttggatggaaagtgagttcagagtttattctagtgcgaataattgcacttttgaatacgtctctcagccttttcttatggaccttgaaggaaaacagggtaatttcaaaaatcttagggaatttgtgttcaagaatattgatggttacttcaagatatactctaagcacacgcctattaatttagtgcgtgatctccctcagggtttttcggctttagaaccattggtagatttgccaataggtattaacatcactaggtttcaaactttacttgctttacatagaagttatttaactcctggtgattcttcttcaggttggacagctggtgctgcagcttattatgtgggttatcttcaacctaggacttttctactgaagtacaatgaaaatggaaccattacagatgctgtagactgtgcacttgaccctctctcagaaacaaagtgtacgttgaaatccttcactgtagaaaaaggaatctatcaaacttctaactttagagtccaaccaacagaatctattgttagatttcctaacatcacaaacttgtgcccttttggtgaagtttttaacgccaccagatttgcatctgtttatgcttggaacaggaagagaatcagcaactgtgttgctgattattctgtcctgtataattccgcatcattttccacttttaagtgttatggagtgtctcctactaaattaaatgatctctgctttactaatgtctatgcagattcatttgtaattagaggtgatgaagtcagacaaatcgctccagggcaaactggaaagattgctgattataactacaaattaccagatgattttacaggctgcgttatagcttggaattctaacaatcttgattctaaggttggtggtaattataattacctgtacagattgtttaggaagtctaatctcaaaccttttgagagagatatttcaactgaaatctatcaggccggtagcacaccttgtaatggtgttgaaggttttaattgttactttcctctgcaatcatatggtttccaacccactaatggtgttggttaccaaccatacagagtagtagtactttcttttgaacttctacatgcaccagcaactgtttgtggacctaaaaagtctactaatttggttaagaacaagtgtgtcaatttcaacttcaatggtttaacaggcacaggtgttcttactgagtctaacaaaaagtttctgcctttccaacaatttggcagagacattgctgacactactgatgctgttcgtgatccacaaacacttgagattcttgacattacaccatgttcttttggtggtgtcagtgttataacaccaggaacaaatacttctaaccaggttgctgttctttatcaggatgttaactgcacagaagtccctgttgctattcatgcagatcaacttactcctacttggcgtgtttattctacaggttctaatgtttttcaaacacgtgcaggctgtttaataggggctgaacatgtcaacaactcatatgagtgtgacatacccattggtgcaggtatatgcgctagttatcagactcagactaattctcctcggagagcaagaagtgtagctagtcaatccatcattgcctacactatgtcacttggtgcagaaaattcagttgcttactctaataactctattgccatacccacaaattttactattagcgttaccacagaaattctaccagtgtctatgaccaagacatcagtagattgtacaatgtacatttgtggtgattcaactgaatgcagcaatcttttgttgcaatatggcagtttttgtacacaattaaaccgtgctttaactggaatagctgttgaacaagacaaaaacacccaagaagtttttgcacaagtcaaacaaatttacaagacaccaccaattaaagattttggcggttttaattttagccagatactgccagatccatcaaaaccaagcaagaggtcatttattgaagatctactgttcaacaaagtgacacttgcagatgctggcttcatcaaacaatatggtgattgccttggtgatattgctgctagagacctcatttgtgcacaaaagtttaacggccttactgttttgccacctttgctcacagatgaaatgattgctcaatacacttctgcactgttagcaggtacaatcacttctggttggacttttggtgcaggtgctgcattacaaataccatttgctatgcaaatggcttataggtttaatggtattggagttacacagaatgttctctatgagaaccaaaaattgattgccaaccaatttaatagtgctattggcaaaattcaagactcactttcttccacagcaagtgcacttggaaaacttcaagatgtggtcaaccaaaatgcacaagctttaaacacgcttgttaaacaacttagctccaattttggtgcaatttcaagtgttttaaacgacatcctttcacgtcttgacaaagttgaggctgaagtgcaaattgataggttgatcacaggcagacttcaaagtttgcagacatatgtgactcaacaattaattagagctgcagaaatcagagcttctgctaatcttgctgctactaaaatgtcagagtgtgtacttggacaatcaaaaagagttgacttttgcggaaagggctatcatcttatgtcatttcctcagtcagcacctcatggtgtcgtctttttgcatgtgacttatgtccctgcacaagaaaagaacttcacaactgctcctgccatttgtcatgatggaaaagcacactttcctcgtgaaggtgtctttgtttcaaatggcacacactggtttgtaacacaaaggaatttttatgaaccacaaatcattactacagacaacacatttgtgtctggtaactgtgatgttgtaataggaattgtcaacaacacagtttatgatcctttgcaacctgaattagactcattcaaggaggagcttgataaatacttcaagaaccatacctcaccagatgttgatttaggtgacatctctggcattaatgcttcagttgtaaacattcagaaagaaatcgaccgcctcaatgaggttgccaagaatttaaatgaatctctcatcgatctccaagaacttggaaagtatgagcagtatataaaatggccatggtacatttggctaggttttatagctggcttgattgccatagtaatggtgacaattatgctttgctgtatgaccagttgctgtagttgtctcaagggctgttgttcttgtggatcctgctgcaaatttgacgaggacgactctgagccagtgctcaaaggagtcaaattacattacacataa

SEQ ID NO: 14 - protein, 1274 aa, Artificial Sequence
  Synthetic_Spike_Protein_Sars-CoV2
MVFVFLVLLPLVSSQCVNLTTRTQLPPAYTNSFTRGVYYPDKVFRSSVLHSTQDLFLPFFSNVTWFHAIHVSGTNGTKRFDNPVLPFNDGVYFASTEKSNIIRGWIFGTTLDSKTQSLLIVNNATNVVIKVCEFQFCNDPFLGVYYHKNNKSWMESEFRVYSSANNCTFEYVSQPFLMDLEGKQGNFKNLREFVFKNIDGYFKIYSKHTPINLVRDLPQGFSALEPLVDLPIGINITRFQTLLALHRSYLTPGDSSSGWTAGAAAYYVGYLQPRTFLLKYNENGTITDAVDCALDPLSETKCTLKSFTVEKGIYQTSNFRVQPTESIVRFPNITNLCPFGEVFNATRFASVYAWNRKRISNCVADYSVLYNSASFSTFKCYGVSPTKLNDLCFTNVYADSFVIRGDEVRQIAPGQTGKIADYNYKLPDDFTGCVIAWNSNNLDSKVGGNYNYLYRLFRKSNLKPFERDISTEIYQAGSTPCNGVEGFNCYFPLQSYGFQPTNGVGYQPYRVVVLSFELLHAPATVCGPKKSTNLVKNKCVNFNFNGLTGTGVLTESNKKFLPFQQFGRDIADTTDAVRDPQTLEILDITPCSFGGVSVITPGTNTSNQVAVLYQDVNCTEVPVAIHADQLTPTWRVYSTGSNVFQTRAGCLIGAEHVNNSYECDIPIGAGICASYQTQTNSPRRARSVASQSIIAYTMSLGAENSVAYSNNSIAIPTNFTISVTTEILPVSMTKTSVDCTMYICGDSTECSNLLLQYGSFCTQLNRALTGIAVEQDKNTQEVFAQVKQIYKTPPIKDFGGFNFSQILPDPSKPSKRSFIEDLLFNKVTLADAGFIKQYGDCLGDIAARDLICAQKFNGLTVLPPLLTDEMIAQYTSALLAGTITSGWTFGAGAALQIPFAMQMAYRFNGIGVTQNVLYENQKLIANQFNSAIGKIQDSLSSTASALGKLQDVVNQNAQALNTLVKQLSSNFGAISSVLNDILSRLDKVEAEVQIDRLITGRLQSLQTYVTQQLIRAAEIRASANLAATKMSECVLGQSKRVDFCGKGYHLMSFPQSAPHGVVFLHVTYVPAQEKNFTTAPAICHDGKAHFPREGVFVSNGTHWFVTQRNFYEPQIITTDNTFVSGNCDVVIGIVNNTVYDPLQPELDSFKEELDKYFKNHTSPDVDLGDISGINASVVNIQKEIDRLNEVAKNLNESLIDLQELGKYEQYIKWPWYIWLGFIAGLIAIVMVTIMLCCMTSCCSCLKGCCSCGSCCKFDEDDSEPVLKGVKLHYT

SEQ ID NO: 15 - DNA, 21746 bp, Artificial Sequence
  COVAX_Syn_RepA56
gtataagagtgattggcgtccgtacgtaccctctcaactctaaaactcttgtagtttaaatctaatctaaactttataaacggcacttcctgcgtgtccatgcccgcgggcctggtcttgtcatagtgctgacatttgtagttccttgactttcgttctctgccagtgacgtgtccattcggcgccagcagcccacccataggttgcataatggcaaagatgggcaaatacggcctgggcttcaaatgggccccagaatttccatggatgcttccgaacgcatcggagaagttgggtaaccctgagaggtcagaggaggatgggttttgcccctctgctgcgcaagaaccgaaagttaaaggaaaaactttggttaatcacgtgagggtgaattgtagccggcttccagctttggaatgctgtgttcagtctgccataatccgtgatatttttgtagatgaggatccccagaaggtggaggcctcaactatgatggcattgcagttcggtagtgccgtcttggttaagccatccaagcgcttgtctattcaggcatggactaatttgggtgtgcttcccaaaacagctgccatggggttgttcaagcgcgtctgcctgtgtaacaccagggagtgctcttgtgacgcccacgtggcctttcacctttttacggtccaacccgatggtgtatgcctgggtaatggccgttttataggctggttcgttccagtcacagccataccggagtatgcgaagcagtggttgcaaccctggtccatccttcttcgtaagggtggtaacaaagggtctgtgacatccggccacttccgccgcgctgttaccatgcctgtgtatgactttaatgtagaggatgcttgtgaggaggttcatcttaacccgaagggtaagtactcctgcaaggcgtatgccctgctgaagggctatcgcggtgttaagcccatcctgtttgtggaccagtatggttgcgactatactggatgtctcgccaagggtcttgaggactatggcgatctcaccttgagtgagatgaaggagttgttccctgtgtggcgtgactccttggatagtgaagtccttgtggcttggcacgttgatcgagatcctcgggctgctatgcgtctgcagactcttgctactgtacgttgcattgattatgtgggccaaccgaccgaggatgtggtggatggagatgtggtagtgcgtgagcctgctcatcttctcgcagccaatgccattgttaaaagactcccccgtttggtggagactatgctgtatacggattcgtccgttacagaattctgttataaaaccaagctgtgtgaatgcggttttatcacgcagtttggctatgtggattgttgtggtgacacctgtgattttcgtgggtgggttgccggcaatatgatggatggctttccatgtccagggtgtaccaaaaattatatgccctgggaattggaggcccagtcatcaggtgttataccagaaggaggtgttctattcactcagagcactgatacagtgaatcgtgagtcctttaagctctacggtcatgctgttgtgccttttggttctgctgtgtattggagcccttgcccaggtatgtggcttccagtaatttggtcgtcggttaagtcatactctggtttgacttatacaggagtagttggttgtaaggcaattgttcaagagacagacgctatatgtcgttctctgtatatggattatgtccagcacaagtgtggcaatctcgagcagagagctatccttggattggacgatgtctatcatagacagttgcttgtgaataggggtgactatagtctcctccttgagaatgtggatttgtttgttaagcggcgcgctgaatttgcttgcaaattcgccacctgtggagatggtcttgtacccctcctactagatggtttagtgccccgcagttattatttgattaagagtggtcaagctttcacctctatgatggttaattttagccatgaggtgactgacatgtgtatggacatggctttattgttcatgcatgatgttaaagtggccactaagtatgttaagaaggttactggcaaactggccgtgcgctttaaagcgttgggtgtagccgttgtcagaaaaattactgaatggtttgatttagccgtggacattgctgctagtgccgctggatggctttgctaccagctggtaaatggcttatttgcagtggccaatggtgttataacctttgtacaggaggtgcctgagcttgtcaagaattttgttgacaagttcaaggcatttttcaaggttttgatcgactctatgtcggtttctatcttgtctggacttactgttgtcaagactgcctcaaatagggtgtgtcttgctggcagtaaggtttatgaagttgtgcagaaatctttgtctgcatatgttatgcctgtgggttgcagcgaagccacttgtttggtgggtgagattgaacctgcagtttttgaagatgatgttgttgatgtggttaaagccccattaacatatcaaggctgttgtaagccacccacttctttcgagaagatttgtattgtggataaattgtatatggccaagtgtggtgatcaattttaccctgtggttgttgataacgacactgttggcgtgttagatcagtgctggaggtttccctgtgcgggcaagaaagtcgagtttaacgacaagcccaaagtcaggaagataccctccacccgtaagattaagatcaccttcgcactggatgcgacctttgatagtgttctttcgaaggcgtgttcagagtttgaagttgataaagatgttacattggatgagctgcttgatgttgtgcttgacgcagttgagagtacgctcagcccttgtaaggagcatgatgtgataggcacaaaagtttgtgctttacttgataggttggcaggagattatgtctatctttttgatgagggaggcgatgaagtgatcgccccgaggatgtattgttccttttctgctcctgatgacgaggactgcgttgcagcggatgttgtagatgcagatgaaaaccaagatgatgatgccgaggactcagcagtccttgtcgctgatacccaagaagaggacggcgttgccaaggggcaggttgaggcggattcggaaatttgcgttgcgcatactggtagtcaagaagaattggctgagcctgatgctgtcggatctcaaactcccatcgcctctgctgaggaaaccgaagtcggagaggcaagcgacagggaagggattgctgaggcgaaggcaactgtgtgtgctgatgctgtagatgcctgccccgatcaagtggaggcatttgaaattgaaaaggtcgaggactctatcttggatgagcttcaaactgaacttaatgcgccagcggacaagacctatgaggatgtcttggcattcgatgccgtatgctcagaggcgttgtctgcattctatgctgtgccgagtgatgagacgcactttaaagtgtgtggattctattcgcctgctatagagcgcactaattgttggctgcgttctactttgatagtaatgcagagtctacctttggaatttaaagacttggagatgcaaaagctctggttgtcttacaaggccggctatgaccaatgctttgtggacaaactagttaagagcgtgcccaagtctattatccttccacaaggtggttatgtggcagattttgcctatttctttctaagccagtgtagctttaaagcttatgctaactggcgttgtttagagtgtgacatggagttaaagcttcaaggcttggacgccatgtttttctatggggacgttgtgtctcatatgtgcaagtgtggtaatagcatgaccttgttgtctgcagatataccctacactttgcattttggagtgcgagatgataagttttgcgctttttacacgccaagaaaggtctttagggctgcttgtgcggtagatgttaatgattgtcactctatggctgtagtagagggcaagcaaattgatggtaaagtggttaccaaatttattggtgacaaatttgattttatggtgggttacgggatgacatttagtatgtctccttttgaactcgcccagttatatggttcatgtataacaccaaatgtttgttttgttaaaggagatgttataaaggttgttcgcttagttaatgctgaagtcattgttaaccctgctaatgggcgtatggctcatggtgccggcgtcgccggcgccatagctgaaaaggcgggcagtgcttttattaaagaaacctccgatatggtgaaggctcagggcgtttgccaggttggtgaatgctatgaatctgccggtggtaagttatgtaaaaaggtgcttaacattgtagggccagatgcgcgagggcatggcaagcaatgctattcacttttagagcgtgcttatcagcatattaataagtgtgacaatgttgtcactactttaatttcggctggtatatttagtgtgcctactgatgtctccctaacttacttacttggtgtagtgacaaagaatgtcattcttgtcagtaacaaccaggatgattttgatgtgatagagaagtgtcaggtgacctccgttgctggtaccaaagcgctatcacttcaattggccaaaaatttgtgccgtgatgtaaagtttgtgacgaatgcatgtagttcgctttttagtgaatcttgctttgtctcaagctatgatgtgttgcaggaagttgaagcgctgcgacatgatatacaattggatgatgatgctcgtgtctttgtgcaggctaatatggactgtctgcccacagactggcgtctcgttaacaaatttgatagtgttgatggtgttagaaccattaagtattttgaatgcccgggcgggatttttgtatccagccagggcaaaaagtttggttatgttcagaatggttcatttaaggaggcgagtgttagccaaataagggctttactcgctaataaggttgatgtcttgtgtactgttgatggtgttaacttccgctcctgctgcgtagcagagggtgaagtttttggcaagacattaggttcagtcttttgtgatggcataaatgtcaccaaagttaggtgtagtgccatttacaagggtaaggttttctttcagtacagtgatttgtccgaggcagatcttgtggctgttaaagatgcctttggttttgatgaaccacaactgctgaagtactacactatgcttggcatgtgtaagtggccagtagttgtttgtggcaattattttgctttcaagcagtcaaataataattgctacatcaacgtggcatgtttaatgctgcaacacttgagtttaaagtttcctaagtggcaatggcaagaggcttggaacgagttccgctctggtaaaccactaaggtttgtgtccttggtattagcaaagggcagctttaaatttaatgaaccttctgattctatcgattttatgcgtgtggtgctacgtgaagcagatttgagtggtgccacgtgcaatttggaatttgtttgtaaatgtggtgtgaagcaagagcagcgcaaaggtgttgacgctgttatgcattttggtacgttggataaaggtgatcttgtcaggggttataatatcgcatgtacgtgcggtagtaaacttgtgcattgcacccaatttaacgtaccatttttaatttgctccaacacaccagagggtaggaaactgcccgacgatgttgttgcagctaatatttttactggtggtagtgtgggccattacacgcatgtgaaatgtaaacccaagtaccagctttatgatgcttgtaatgttaataaggtttcggaggctaagggtaattttaccgattgcctctaccttaaaaatttaaagcaaaccttctcgtctgtgctgacgactttttatttagatgacgtaaagtgtgtggagtataagccagatttatcgcagtattactgtgagtctggtaaatattatacaaaacccattattaaggcccaatttagaacatttgagaaggttgatggtgtctataccaactttaaattggtgggacatagtattgctgaaaaactcaatgctaagctgggatttgattgtaattctccctttgtggagtataaaattacagagtggccaacagctactggagatgtggtgttggctagtgatgatttgtatgtaagtcggtacttaagcgggtgcattacttttggtaaaccggttgtctggcttggccatgaggaagcatcgctgaaatctctcacatattttaatagacctagtgtcgtttgtgaaaataaatttaacgtgttgcccgttgatgtcagtgaacccacggacaaggggcctgtgcctgctgcagtccttgttaccggcgtccctggagctgatgcgtcagctggtgccggtattgccaaggagcaaaaagcctgtgcttctgctagtgtggaggatcaggttgttacggaggttcgtcaagagccatctgtttcagctgctgatgtcaaagaggttaaattgaatggtgttaaaaagcctgttaaggtggaaggtagtgtggttgttaatgatcccactagcgaaaccaaagttgttaaaagtttgtctattgttgatgtctatgatatgttcctgacagggtgtaagtatgtggtttggactgctaatgagttgtctcgactagtaaattcaccgactgttagggagtatgtgaagtggggtatgggaaagattgtaacacccgctaagttgttgttgttaagagatgagaagcaagagttcgtagcgccaaaagtagtcaaggcgaaagctattgcctgctattgtgctgtgaagtggtttctcctctattgttttagttggataaagtttaatactgacaataaggttatatacaccacagaagtagcttcaaagcttactttcaagttgtgctgtttggcctttaagaatgccttacagacgtttaattggagcgttgtgtctaggggctttttcctagttgcaacggtctttttactctggtttaactttttgtatgctaatgttattttgagtgacttctatttgcctaatattgggcctctccctacgtttgtgggacagatagttgcgtggtttaagactacatttggtgtgtcaaccatctgtgatttctaccaggtgacggatttgggctatagaagttcgttttgtaatggaagtatggtatgtgaactatgcttctcaggttttgatatgctggacaactatgatgctataaatgttgttcaacacgttgtagataggcgtttgtcctttgactatattagcctatttaaactggtagttgagcttgtaatcggctactctctttatactgtgtgcttctacccactgtttgtccttattggaatgcagttattgaccacatggttgcctgaattctttatgctggagactatgcattggagtgctcgtttgtttgtgtttgttgccaatatgcttccagcttttacgttactgcgattttacatcgtggtgacagctatgtataaggtctattgtctttgtagacatgttatgtatggatgtagtaagcctggttgcttgttttgttataagagaaaccgtagtgtccgtgttaagtgtagcaccgttgttggtggttcactacgctattacgatgtaatggctaacggcggcacaggtttctgtacaaagcaccagtggaactgtcttaattgcaattcctggaaaccaggcaatacattcataactcatgaagcagcggcggacctctctaaggagttgaaacgccctgtgaatccaacagattctgcttattactcggtcacagaggttaagcaggttggttgttccatgcgtttgttctacgagagagatggacagcgtgtttatgatgatgttaatgctagtttgtttgtggacatgaatggtctgctgcattctaaagttaaaggtgtgcctgaaacgcatgttgtggttgttgagaatgaagctgataaagctggttttctcggcgccgcagtgttttatgcacaatcgctctacagacctatgttgatggtggaaaagaaattaataactaccgccaacactggtttgtctgttagtcgaactatgtttgacctttatgtagattcattgctgaacgtcctcgacgtggatcgcaagagtctaacaagttttgtaaatgctgcgcacaactctctaaaggagggtgttcagcttgaacaagttatggatacctttattggctgtgcccgacgtaagtgtgctatagattctgatgttgaaaccaagtctattaccaagtccgtcatgtcggcagtaaatgctggcgttgattttacggatgagagttgtaataacttggtgcctacctatgttaaaagtgacactatcgttgcagccgatttgggtgttcttattcagaataatgctaagcatgtacaggctaatgttgctaaagccgctaatgtggcttgcatttggtctgtggatgcttttaaccagctatctgctgacttacagcataggctgcgaaaagcatgttcaaaaactggcttgaagattaagcttacttataataagcaggaggcaaatgttcctattttaactacaccgttctctcttaaagggggcgctgtttttagtagaatgttacaatggttgtttgttgctaatttgatttgtttcattgtgttgtgggcccttatgccaacatatgcagtgcacaaatcggatatgcagttgcctttatatgccagttttaaagttatagataacggtgtgctaagggatgtgtctgttactgacgcatgcttcgcaaacaaatttaatcaattcgaccaatggtatgagtctacttttggtcttgcttattaccgcaactctaaggcttgtcctgttgtggttgctgtaatagatcaagacattggccataccttatttaatgttcctaccacagttttaagatatggatttcatgtgttgcattttataacccatgcatttgctactgatagcgtgcagtgttacacgccacatatgcaaatcccctatgataatttctatgctagtggttgcgtgttgtcatccctctgtactatgcttgcgcatgcagatggaaccccgcatccttattgttatacagggggtgttatgcataatgcctctctgtatagttctttggctcctcatgtccgttataacctggctagttcaaatggttatatacgttttcccgaagtggttagtgaaggcattgtgcgtgttgtgcgcactcgctctatgacctactgcagggttggtttatgtgaggaggccgaggagggtatctgctttaattttaatcgttcatgggtattgaacaacccgtattatagggccatgcctggaactttttgtggtaggaatgcttttgatttaatacatcaagttttaggaggattagtgcggcctattgatttctttgccttaacggcgagttcagtggctggtgctatccttgcaattattgtcgttttggctttctattatttaatcaagcttaagcgtgcctttggtgactacactagtgttgtggttatcaatgtaattgtgtggtgtataaattttctgatgctttttgtgtttcaggtttatcccacattgtcttgtttatatgcttgtttctacttctacaccacgctttatttcccttcggagataagtgttgttatgcatttgcaatggcttgtcatgtatggtgctattatgcccttgtggttttgcattatttacgtggcagtcgttgtttcaaaccatgcattgtggttgttctcttactgccgcaaaattggtaccgaggttcgtagtgacggcacatttgaggaaatggcccttactacctttatgattactaaagaatcttattgtaagttgaaaaactctgtttctgatgttgcttttaacaggtacttgagtctttacaacaagtaccgttacttcagtggcaaaatggatactgccgcttatagagaggctgcctgttcacaactggcaaaggcaatggaaacatttaaccataataatggtaatgatgttctctatcagcctccaaccgcctctgttactacatcatttttacagtctggtatagtgaagatggtgtcgcccacctctaaagtggagccttgtattgttagtgttacttatggtaacatgacacttaatgggttgtggttggatgataaagtttattgcccaagacatgttatctgttcttcagctgacatgacagaccctgattatcctaatttgctttgtagagtgacatcaagtgatttttgtgttatgtctggtcgtatgagccttactgtaatgtcttatcaaatgcagggctgccaacttgttttgactgttacactgcaaaatcctaacacgcctaagtattccttcggtgttgttaagcctggtgagacatttactgtactggctgcatacaatggcagacctcaaggagccttccatgttacgcttcgtagtagccataccataaagggctcctttctatgtggatcctgcggttctgtaggatatgttttaactggcgatagtgtacgatttgtttatatgcatcagctagagttgagtactggttgtcataccggtactgactttagtgggaacttttatggtccctatagagatgcgcaagttgtacaattgcctgttcaggattatacgcagactgttaatgttgtagcttggctttatgctgctatttttaacagatgcaactggtttgtgcaaagtgatagttgttccctggaggagtttaatgtttgggctatgaccaatggttttagctcaatcaaagccgatcttgtcttggatgcgcttgcttctatgacaggcgttacagttgaacaggtgttggccgctattaagaggctgcattctggattccagggcaaacaaattttaggtagttgtgtgcttgaagatgagctgacaccaagtgatgtttatcaacaactagctggtgtcaagctacagtcaaagcgcacaagagttataaaaggtacatgttgctggatattggcttcaacgtttttgttctgtagcattatctcagcatttgtaaaatggactatgtttatgtatgttactacccatatgttgggagtgacattgtgtgcactttgttttgtaagctttgctatgttgttgatcaagcataagcatttgtatttaactatgtacatcatgcctgtgttatgcacactgttttacaccaactatttggttgtgtacaaacagagttttagaggtctagcttatgcttggctttcacactttgtccctgctgtagattatacatatatggatgaagttttatatggtgttgtgttgctagtagctatggtgtttgttaccatgcgtagcataaaccacgacgtcttttctattatgttcttggttggtagacttgtcagcctggtatccatgtggtattttggagccaatttagaggaagaggtactattgttcctcacatccctatttggcacgtacacatggactactatgttgtcattggctaccgctaaggttattgctaaatggttggctgtgaatgtcttgtacttcacagacgtaccgcaaattaaattagttctgttgagctacttgtgtattggttatgtgtgttgttgttattggggaatcttgtcactccttaatagcatttttaggatgccattgggcgtctacaattataaaatctccgttcaggagttacgttatatgaatgctaatggcttgcgcccacctagaaatagttttgaggccctgatgcttaattttaagctgttgggaattggtggtgtgccagtcattgaagtatctcaaattcaatcaagattgacggatgttaaatgtgctaatgttgtgttgcttaattgcctccagcacttgcatattgcatctaattctaagttgtggcagtattgtagtactttgcacaatgaaatactggctacatctgatttgagcgtggccttcgataagttggctcaactcttagttgttttatttgctaatccagcagcagtggatagcaagtgccttgcaagtattgaagaagtgagcgatgattacgttcgcgacaatactgtcttgcaagccttacagagtgaatttgttaatatggctagcttcgttgagtatgaacttgctaagaagaatctagatgaggctaaggctagcggctctgccaatcaacagcagattaagcagctagagaaggcgtgtaatattgctaagtcagcatatgagcgcgacagagctgttgctcgtaagctggaacgtatggctgatttagctcttacaaacatgtataaagaagctagaattaatgataagaagagtaaggtagtgtctgcattgcaaaccatgctctttagtatggtgcgtaagctagataaccaagctcttaattctattttagacaacgcagttaagggttgtgtacctttgaatgcaataccatcattgacttcgaacactctgactataatagtgccagataagcaggtttttgatcaggttgtggataatgtgtatgtcacctatgctgggaatgtatggcatatacagtttattcaagatgctgatggtgctgttaaacaattgaatgagatagatgttaattcaacctggcctctagtcattgctgcaaataggcataatgaagtgtctactgttgttttgcagaacaatgagttgatgcctcagaagttgagaactcaggttgtcaatagtggctcagatatgaattgtaatactcctacccagtgttactataatactactggcacgggtaagattgtgtatgctatacttagtgactgtgacggcctgaagtacactaagatagtaaaagaagatggaaattgtgttgttttggaattggatcctccctgtaagttttctgttcaggatgtgaagggccttaaaattaagtacctttactttgtgaaggggtgtaatacactggctagaggctgggttgtaggcaccttatcctcgacagtgagattgcaggcgggtacggcaactgagtatgcctccaactctgcaatactgtcgctgtgtgcgttttctgtagatcctaagaaaacgtacttggattatataaaacagggtggagttcccgttactaattgtgttaagatgttatgtgaccatgctggcactggtatggccattactattaagccggaggcaaccactaatcaggattcttatggtggtgcttccgtttgtatatattgccgctcgcgtgttgaacatccagatgttgatggattgtgcaaattacgcggcaagtttgtccaagtgcccttaggcataaaagatcctgtgtcatatgtgttgacgcatgatgtttgtcaggtttgtggcttttggcgagatggtagctgttcctgtgtaggcacaggctcccagtttcagtcaaaagacacgaactttttaaacggattcggggtacaagtgtaaatgcccgtcttgtaccctgtgccagtggcttggacactgatgttcaattaagggcatttgacatttgtaatgctaatcgagctggcattggtttgtattataaagtgaattgctgccgcttccagcgtgtagatgaggacggcaacaagttggataagttctttgttgttaaaagaactaatttagaagtgtataacaaggagaaagaatgctatgagttgacaaaagaatgcggtgttgtggctgaacacgagttcttcacatttgatgtggagggaagtcgggtaccacacatagtccgtaaagatctttcaaagtttactatgttagatctttgctatgcattgcgtcattttgaccgcaatgattgttcaactcttaaggaaattctccttacatatgctgagtgtgaagagtcctacttccaaaagaaggactggtatgattttgttgagaatcctgatataattaatgtgtacaagaagcttggtcctatatttaatagagccctgcttaacactgccaagtttgcagacgcattagtggaggcaggcttagtaggtgttttaacacttgataatcaagatttatatggtcaatggtatgactttggagattttgtcaagacagtacctggttgtggtgttgccgtggcagactcttattattcatatatgatgccaatgctgactatgtgtcatgcgttggatagtgagttgtttgttaatggtacttatagggagtttgaccttgttcagtatgattttactgatttcaagctagagctgttcactaagtattttaagcattggagtatgacctaccacccgaacacctgtgagtgcgaggatgacaggtgcattattcattgcgccaattttaatatacttttcagcatggtcttacctaagacctgttttgggcctcttgttaggcagatatttgtggatggtgttcctttcgttgtgtcgatcggttaccattataaagaattaggtgttgttatgaatatggatgtggatacacatcgttatcgcttgtctcttaaggacttgcttttgtatgctgcagaccctgcccttcatgtggcgtctgctagtgcactgcttgatttgcgcacatgttgttttagcgttgcagctattacaagtggcgtaaaatttcaaacagttaaacctggaaattttaatcaggatttctacgagtttattttgagtaaaggcctgcttaaagaggggagctccgttgatttgaagcacttcttctttacgcaggatggtaatgctgctattactgattacaattactacaagtataatctacccaccatggtggatattaagcagttgttgtttgttttagaagttgttaataagtacttcgagatctatgagggtgggtgtatacccgcaacacaggtcattgttaataattatgacaagagtgctggctatccatttaataaatttggaaaggccaggctctattatgaggcattatcatttgaggagcaggatgaaatttatgcgtataccaaacgcaatgtcctgccgaccctaactcaaatgaatcttaaatatgctattagtgctaagaatagggcccgcaccgttgctggtgtctctattctcagtactatgactggcagaatgtttcatcaaaagtgtctaaagagtatagcagctactcgcggtgttcctgtagttataggcaccacgaagttctatggcggttgggatgatatgttacgccgccttattaaagatgttgatagtcctgtactcatgggttgggactatcctaaatgtgatcgtgctatgccaaacatactgcgtattgttagtagtttggtgctagcccgtaaacatgattcgtgctgttcgcatacggatagattctatcgtcttgcgaacgagtgcgcccaagttttgagtgaaattgttatgtgtggtggttgttattatgttaaaccaggtggcactagtagtggggatgcaaccactgcttttgctaattctgtgtttaacatttgtcaagctgtttccgccaatgtatgctcgcttatggcatgcaatggacacaaaattgaagatttgagtatacgcgagttacaaaagcgcctatactctaatgtctatcgtgcggaccatgttgaccccgcatttgttagtgagtattatgagtttttaaacaagcattttagtatgatgattttgagtgatgatggtgttgtgtgttataattcagagtttgcgtccaagggttatattgctaatataagtgcctttcaacaggtattatattatcaaaacaacgtgtttatgtctgaggccaaatgttgggtagaaacagacatcgaaaagggaccgcatgaattttgttctcaacatacaatgctagtcaagatggatggtgatgaagtctaccttccataccctgatccttcgagaatcttaggagcaggctgttttgttgatgatttactcaagactgatagcgttctcttgatagagcgtttcgtaagtcttgcaattgatgcttatcctttagtataccatgagaacccagagtatcaaaatgtgttccgggtatatttagaatacatcaagaagctgtacaatgatctcggtaatcagatcctggacagctacagtgttattttaagtacttgtgatggtcaaaagtttactgacgagacgttttacaagaacatgtatttaagaagtgcagtgctgcaaagcgttggtgcctgcgttgtctgtagttctcaaacatcattacgttgtggcagttgcatacgcaagcctttgctgtgttgcaaatgcgcctatgatcatgttatgtccactgatcataaatatgtcctgagtgtgtcaccatatgtgtgtaattcaccgggatgtgatgtaaatgatgttaccaaattgtatttaggtggtatgtcatattattgtgaggaccataaaccacagtattcattcaaattggtgatgaatggtatggtttttggtttatataagcagtcttgtactggttcgccctacatagaggattttaataaaatcgctagttgcaaatggacagaagtcgatgattatgtgctagctaatgaatgcaccgaacgccttaaattgtttgccgcagaaacgcagaaggccacagaagaggcctttaagcaatgttatgcgtcagcaacgatccgtgagatcgtgagcgatcgggagttaattttatcttgggaaattggtaaagtccgcccgccacttaataaaaattacgtgttcaccggctaccattttactaataatggtaagacagttttaggtgagtatgtttttgataagagtgagttgactaatggtgtgtattatcgcgccacaaccacttataagttatctgtaggtgatgtgttcattttaacatcacacgcagtgtctagtttaagtgctcctacattagtaccgcaggagaattatactagcattcgttttgctagtgtttatagtgtgcctgagacgtttcagaataatgtgcctaattatcagcacattggaatgaagcgctattgtactgtacagggaccgcctggtactggtaagtcccatctagccattgggctagctgtttattattgtacagcgcgcgtggtgtataccgctgctagccatgctgcagttgacgcgctgtgtgaaaaggcacataaatttctcaacatcaacgactgcacgcgtattgttcctgcaaaggtgcgtgtagattgttatgataaattcaaggtcaatgacaccactcgcaagtatgtgtttactacaataaatgcattacctgagttggtgactgacattattgtcgttgatgaagttagtatgcttaccaactatgagctgtctgttattaacagtcgtgttagggctaagcattatgtgtatattggcgacccggcgcagttacctgcaccacgtgtgctactgaataagggaactctagaacctagatattttaattccgttaccaagctaatgtgttgtttgggtccagatattttcttgggcacctgttatagatgccctaaggagattgtggatacggtgtcagccttggtttataataataagctgaaggctaaaaatgataatagctccatgtgctttaaggtttattataagggccagactacacatgagagttctagtgctgttaatatgcagcaaatacatttaatttccaagtttctgaaggcaaaccccagttggagtaacgccgtatttattagtccttataactcgcagaactatgttgctaagagagtcttgggattacaaacccagacagtagactcagcgcagggttctgaatatgattttgttatctactcacagactgcggaaacagcgcattctgtcaatgtaaatagattcaatgttgctattacacgtgctaagaagggtattctctgtgtcatgagtagtatgcaattatttgagtctcttaattttactacactgacgttggataagattaacaatccacgattacagtgtactacaaatttgtttaaggattgtagcaggagctatgtaggatatcacccagcccatgcaccatcctttttggcagttgatgacaaatataaggtaggcggtgatttagccgtttgccttaatgttgctgattctgctgtcacttattcgcggcttatatcactcatgggattcaagcttgacttgacccttgatggttattgtaagctgtttataactagagatgaagctatcaaacgtgttagagcctgggttggcttcgatgcagaaggtgcccatgcgatacgtgatagcattgggacaaatttcccattacaattaggcttttcgactggaattgattttgttgtcgaagccactggaatgtttgctgagagagatggttatgtctttaaaaaggcagccgcacgagctcctcctggcgaacaatttaaacaccttatcccacttatgtcaagagggcagaaatgggatgtggttcgcattagaatagtacaaatgttgtcagaccacctagtggatttggcagacagtgttgtacttgtgacgtgggctgccagctttgagctcacatgtttgcgatatttcgctaaagttggaagagaagttgtgtgtagtgtctgcaccaagcgtgcgacatgttttaattctagaactggatactatggatgctggcgacatagttattcctgtgattacctgtacaacccactaatagttgacattcaacagtggggatatacaggatctttaactagcaatcatgatcctatttgcagcgtgcataagggtgctcatgttgcatcatctgatgctatcatgacccggtgtctagctgttcatgattgcttttgtaagtctgttaattggaatttagaataccccattatttcaaatgaggtcagtgttaatacctcctgcaggttattgcagcgcgtaatgtttagggctgcgatgctatgcaataggtatgatgtgtgttatgacattggcaaccctaaaggtcttgcctgtgtcaaaggatatgattttaagttctatgacgcctcccctgttgttaagtctgttaaacagtttgtttacaaatacgaggcacataaagatcaatttttagatggtttgtgtatgttttggaactgcaatgtggataagtatccagcgaatgcagttgtgtgtaggtttgacacgcgtgtgttgaacaaattaaatctccctggctgtaatggtggcagtttgtatgttaacaaacatgcattccacaccagtccctttacccgggctgccttcgagaatttgaagcctatgcctttcttttattattcagatacgccctgtgtgtatatggaaggcatggaatctaagcaggtcgattatgtcccattgagaagcgctacatgcatcacaagatgcaatttaggtggcgctgtttgtttaaaacatgctgaggagtatcgtgagtaccttgagtcttacaatacggcaaccacagcgggttttactttttgggtctataagacttttgatttttacaacctttggaatacttttactaggctccaaagtttagaaaatgtagtgtataacctggtcaacgctggacactttgatggccgggcgggtgaactgccttgtgctgttataggtgagaaagtcattgccaagattcaaaatgaggatgtcgtggtctttaaaaataacacgccattccccactaatgtggctgtcgaattatttgctaagcgcagtattcggccccaccccgagcttaagctctttagaaatttgaatattgacgtgtgctggagtcacgtcctttgggattatgctaaggatagtgtgttttgcagttcgacgtataaggtctgcaaatacacagatttacagtgcattgaaagcttgaatgtactttttgatggtcgtgataatggtgctcttgaagcttttaagaagtgccggaatggcgtctacattaacacgacaaaaattaaaagtctgtcgatgattaaaggcccacaacgtgccgatttgaatggcgtagttgtggagaaagttggagattctgatgtggaattttggtttgctgtgcgtaaagacggtgacgatgttatcttcagccgtacagggagccttgaaccgagccattaccggagcccacaaggtaatccgggtggtaatcgcgtgggtgatctcagcggtaatgaagctctagcgcgtggcactatctttactcaaagcagattattatcttctttcacacctcgatcagagatggagaaagattttatggatttagatgatgatgtgttcattgcaaaatatagtttacaggactacgcgtttgaacacgttgtttatggtagttttaaccagaagattattggaggtttgcatttgcttattggcttagcccgtaggcagcaaaaatccaatctggtaattcaagagttcgtgacatacgactctagcattcattcgtactttatcactgacgagaacagtggtagtagtaagagtgtgtgcactgttattgatttattgttagatgattttgtggacattgtaaagtccctgaatctaaagtgtgtgagtaaggttgttaatgttaatgtggattttaaggacttccagtttatgttgtggtgcaatgaggagaaggtcatgactttctatcctcgtttgcaggctgctgctgactggaaacctggttatgttatgcctgtcttatataagtatttggaatcgcctctggaaagagtaaacctctggaattatggcaagccgattactttacctacaggatgtatgatgaatgttgctaagtatactcaattatgtcaatatttgagcactacaacattagcagttccggctaatatgcgtgtcttacaccttggtgccggttcggataagggtgttgcccctgggtctgcagttcttaggcagtggctaccagcgggaagtattcttgtagataatgatgtgaatccatttgtgagtgacagtgtcgcctcatattatggaaattgtataaccttaccctttgattgtcagtgggatctgataatttctgatatgtacgaccctcttactaagaacattggggagtacaacgtgagtaaagatggattctttacttacctctgtcatttaattcgtgacaagttggctctgggtggcagtgttgccataaaaataacagagttttcttggaacgctgagttatatagtttaatggggaagtttgcgttctggacaatcttttgcaccaacgtaaacgcctcttcaagtgaaggatttttgattggcataaattggttgaataagacccgtaccgaaattgacggtaaaaccatgcatgccaattatctgttttggagaaatagtacaatgtggaatggaggggcttacagtctctttgacatgagtaagttccctttgaaagcggctggtacggctgttgttagccttaaaccagaccaaataaatgacttagtcctctccttgattgagaagggcaagttattagtgcgtgatacacgcaaagaagtttttgttggcgatagcctagtaaatgtcaaataa

SEQ ID NO: 16 - DNA, 9589 bp, Artificial Sequence
  COVAX_SYNCoat56
atctatacttgtcgtggctgtgaaaatggcctttgctgacaagcctaatcatttcataaactttcccctggcccaatttagtggctttatgggtaagtatttaaagctacagtctcaacttgtggaaatgggtttagactgtaaattacagaaggcaccacatgttagtattaccctgcttgatattaaagcagaccaatacaaacaggtggaatttgcaatacaagaaataatagatgatctggcggcatatgagggagatattgtctttgacaaccctcacatgcttggcagatgccttgttcttgatgttagaggatttgaagagttgcatgaagatattgttgaaattctccgcagaaggggttgcacggcagatcaatccagacactggattccgcactgcactgtggcccaatttgacgaagaaagagaaacaaaaggaatgcaattctatcataaagaacccttctacctcaagcataacaacctattaacggatgctgggcttgagctcgtgaagataggttcttccaaaatagatgggttttattgtagtgaactgagtgtttggtgtggtgagaggctttgttataagcctccaacacccaaattcagtgatatatttggctattgctgcatagataaaatacgtggtgatttagaaataggcgacctgccgcaggatgatgaggaagcgtgggccgagctaagttaccactatcaaagaaacacctacttcttcagacatgtgcacgataatagcatctattttcgtaccgtgtgtagaatgaagggttgtatgtgttgatttgtttttacactattagtgtaataagcttattattttgttgaaaagggcaggatgtgcatagctatggctcctcgcacactgcttttgctgatttgatgtcagctggtgtttgggttcaatgaacctcttaacatcgtttcacatttaaatgatgactggtttctatttggtgacagtcggtccgactgtacctatgtagaaaataacggtcatcctaaattagattggcttgacctcgacccaaagttgtgtaattcaggaaagatttccgcaaagagtggtaactctctctttaggagttttcacttcactgatttttacaattatacgggtgagggataccaaattgtattttatgaaggagttaattttagtcccagccatggctttaaatgcctggctcatggagataataaaagatggatgggcaataaagctcgattttatgcccgagtgtatgagaagatggcccaatataggagcctatcgtttgttaatgtgtcttatgcctatggaggtaatgcaaagcccgcctccatttgcaaagacaatactttaacactcaataaccccaccttcatatcgaaggagtctaattatgttgattactactacgagagtgaggctaatttcacactagaaggttgtgatgaatttatagtaccgctctgtggttttaatggccattccaagggctcgtcgtcggatgctgccaataaatattatactgactctcagagttactataatatggatattggtgtcttatatgggttcaattcgaccttggatgttggcaacactgctaaggatccgggtcttgatctcacttgtaggtatcttgcattgactcctggtaattataaggctgtgtccttagaatatttgttaagcttaccctcaaaggctatttgcctccataagacaaagcgctttatgcctgtgcaggtagttgactcaaggtggagtagcatccgccagtcagacaatatgaccgctgcagcctgtcagctgccatattgtttctttcgcaacacatctgcgaattatagtggtggcacacatgatgcgcaccatggtgattttcatttcaggcagttattgtctggtttgttatataatgtttcctgtattgcccagcagggtgcatttctttataataatgtgtcgtcctcttggccagcctatgggtacggtcattgtccaacggcagctaacattggttatatggcacctgtttgtatctatgaccctctcccggtcatactgctaggtgtgttattgggtatagctgtgttgactattgtgtttctgatgttttattttatgacggatagcggtgttagattgcatgaggcataatctaaacatgctgttcgtgtttattctatttttgccctcttgtttagggtatattggtgattttagatgtatccagcttgtgaattcaaacggtgctaatgttagtgctccaagcattagcaccgagacggttgaagtttcacaaggcctggggacatattatgtgttagatcgagtttatttaaatgccacattattgcttactggttactacccggtcgatggttctaagtttagaaacctcgctcttacgggaactaactcagttagcttgtcgtggtttcaaccaccctatttaagtcagtttaatgatggcatatttgcgaaggtgcagaaccttaagacaagtacgccatcaggtgcaactgcatattttcctactatagttataggtagtttgtttggctatacttcctataccgttgtaatagagccatataatggtgttataatggcctcagtgtgccagtataccatttgtcagttaccttacactgattgtaagcctaacactaatggtaataaactgatagggttttggcacacggatgtaaaacccccaatttgtgtgttaaagcgaaatttcacgcttaatgttaatgctgatgcattttattttcatttctaccaacatggtggtactttttatgcgtactatgcggataaaccctccgctactacgtttttgtttagtgtatatatcggcgatattttaacacagtattatgtgttacctttcatctgcaacccaacagctggtagcacttttgctccgcgctattgggttacacctttggttaagcgccaatatttgtttaatttcaaccagaagggtgtcattactagtgctgttgattgtgctagtagttataccagtgaaataaaatgtaagacccagagcatgttacctagcactggtgtctatgagttatccggttatacggtccaaccagttggagttgtataccggcgtgttgctaacctcccagcttgtaatatagaggagtggcttactgctaggtcagtcccctcccctctcaactgggagcgtaagacttttcagaattgcaattttaacttaagcagcctgttacgttatgttcaggctgagagtttgttttgtaataatatcgatgcttccaaagtgtatggccgctgctttggtagtatttcagttgataagtttgctgtaccccgaagtaggcaagttgatttacagcttggtaactctggatttctgcagactgctaattataagattgatacagctgccacttcgtgtcagctgcattacaccttgcctaagaataatgtcaccataaacaaccataacccctcgtcttggaataggaggtatggctttaatgatgctggcgtctttggcaaaaaccaacatgacgttgtttacgctcagcaatgttttactgtaagatctagttattgcccgtgtgctcaaccggacatagttagcccttgcactactcagactaagcctaagtctgcttttgttaatgtgggtgaccattgtgaaggcttaggtgttttagaagataattgtggcaatgctgatccacataagggttgtatctgtgccaacaattcatttattggatggtcacatgatacctgccttgttaatgatcgctgccaaatttttgctaatatattgctgaatggcattaatagtggtaccacatgttccacagatttgcagttgcctaatactgaagtggttactggcatttgtgtcaaatatgacctctacggtattactggacaaggtgtttttaaagaggttaaggctgactattataatagctggcaaacccttctgtatgatgttaatggtaatttgaatggttttcgtgatcttaccactaacaagacttatacgataaggagctgttatagtggccgtgtttctgctgcatttcataaagatgcacccgaaccggctctgctctatcgtaatataaattgtagctatgtttttagcaataatatctcccgtgaggagaacccacttaattactttgatagttatctgggttgtgttgttaatgctgataaccgcacggatgaggcgcttcctaattgtgatctccgtatgggtgctggcttatgcgttgattattcaaaatcacgcagggctcaccgatcagtttctactggctatcggttaactacatttgagccatacactccgatgttagttaatgatagtgtccaatccgttgatggattatatgagatgcaaataccaaccaattttactattgggcaccatgaggagttcattcaaactagatctccaaaggtgactatagattgtgctgcatttgtctgtggtgataacactgcatgcaggcagcagttggttgagtatggctctttctgtgttaatgttaatgccattcttaatgaggttaataacctcttggataatatgcaactacaagttgctagtgcattaatgcagggtgttactataagctcgagactgccagacggcatctcaggccctatagatgacattaattttagtcctctacttggatgcataggttcaacatgtgccgaggacggcaatggacctagtgcaatccgagggcgttctgctatagaggatttgttatttgacaaggtcaaattatctgatgttggctttgtcgaggcttataataattgcaccggtggtcaagaagttcgtgacctcctttgtgtacaatcttttaatggcatcaaagtattacctcctgtgttgtcagagagtcagatctctggctacacaaccggtgctactgcggcagctatgttcccaccgtggtcagcagctgccggtgtgccatttagtttaagtgttcaatatagaattaatggtttaggtgtcactatgaatgtgcttagtgagaaccaaaagatgattgctagtgcttttaacaatgcgctgggtgctatccaggatgggtttgatgcaaccaattctgctttaggtaagatccagtccgttgttaatgcaaatgctgaagcactcaataacttactaaatcaactttctaacaggtttggtgctattagtgcttctttacaagaaattctaactcggcttgaggctgtagaagcaaaagcccagatagatcgtcttattaatggcaggttaactgcacttaatgcgtatatatccaagcaacttagtgatagtacgcttattaaagttagtgctgctcaggccatagaaaaggtcaatgagtgcgttaagagccaaaccacgcgtattaatttctgtggcaatggtaatcatatattatctcttgtccagaatgcgccttatggcttatattttatacacttcagctatgtgccaatatcctttacaaccgcaaatgtgagtcctggactttgcatttctggtgatagaggattagcacctaaagctggatattttgttcaagatgatggagaatggaagttcacaggcagttcatattactaccctgaacccattacagataaaaacagtgtcattatgagtagttgcgcagtaaactacacaaaggcacctgaagttttcttgaacacttcaatacctaatccacccgactttaaggaggagttagataaatggtttaagaatcagacgtctattgcgcctgatttatctctcgatttcgagaagttaaatgttactttgctggacctgacgtatgagatgaacaggattcaggatgcaattaagaagttaaatgagagctacatcaacctcaaggaagttggcacatatgaaatgtatgtgaaatggccttggtatgtttggttgctaattggattagctggtgtagctgtttgtgtgttgttattctttatatgttgctgcacaggttgtggctcatgttgttttaagaagtgtggaaattgttgtgatgagtatggaggacaccaggacagtattgtgatacataatatttcctctcatgaggattgactatcacagcctctcctggaaagacagaaaatctaaacaatttatagcattctcattgctacctggccccgtaagaggcagtcatagctatggccgtgttggtcctaaggctacattggctgctgtctttattggtccatttattgtagcatgtatgctaggcattggcctagtttatttattgcaattgcaagttcaaatttttcatgttaaggataccatacgtgtgactggcaagccagccactgtgtcttatactacaagtacaccagtaacaccgagcgcgacgacgctcgatggtactacgtatactttaattagacccactagctcttatacaagagtttatcttggtactccaagaggttttgattatagtacatttgggcctaagaccctagattatgttactaatctaaacctcatcttaattctggtcgtccatatacttttaaggcattgtccaggcatatgaggccaacagccacatggatttggcatgtgagtgatgcatggttacgccgcacgcgggactttggtgtcattcgcctagaagatttttgttttcaatttaattatagccaaccccgagttggttattgtagagttcctttaaaggcttggtgtagcaaccagggtaaatttgcagcgcagtttaccctaaaaagttgcgaaaaaccaggtcacgaaaaatttattactagcttcacggcctacggcagaactgtccaacaggccgttagcaagttagtagaagaagctgttgattttattctttttagggccacgcagctcgaaagaaatgtttaatttattccttacagacacagtatggtatgtggggcagattatttttatattcgcagtgtgtttgatggtcaccataattgtggttgccttccttgcgtctatcaaactttgtattcaactttgcggtttatgtaatactttggtgctgtccccttctatttatttgtatgataggagtaagcagctttataagtactataatgaagaaatgagactgcccctattagaggtggatgatatctaatccaaacattatgagtagtactactcaggccccagagcccgtctatcaatggaccgccgacgaggcagttcaattccttaaggaatggaacttctcgttgggcattatactactctttattactatcatactacagttcggttacacgagccgtagcatgtttatttatgttgtgaaaatgataatcttgtggttaatgtggccactgactattgttttgtgtattttcaattgcgtgtatgcgctaaataatgtgtatcttggattttctatagtgtttactatagtgtccattgtaatctggatcatgtattttgtgaacagcataaggttgtttatcaggactggtagctggtggagcttcaaccccgaaacaaacaaccttatgtgtatagatatgaaaggtaccgtgtatgttagacccattattgaggattaccatacactaacagccactattattcgtggccacctctacatgcaaggtgttaagctaggcaccggtttctctttgtctgacttgcccgcttatgttacagttgctaaggtgtcacacctttgcacttataagcgcgcattcttagacaaggtagacggtgttagcggttttgctgtttatgtgaagtccaaggtcggaaattaccgactgccctcaaacaaaccgagtggcgcggacaccgcattgttgagaacctaatctaaactttaaggatgtcttttgttcctgggcaagaaaatgccggtggcagaagctcctctgtaaaccgcgctggtaatggaatcctcaagaaaaccacttgggctgaccaaaccgagcgtggaccaaataatcaaaatagaggcagaaggaatcagccaaagcagactgcaactactcaacccaactccgggagtgtggttccccattactcctggttttctggcattacccagttccaaaagggaaaggagtttcagtttgcagaaggacaaggagtgcctattgccaatggaatccccgcttcagagcaaaagggatattggtatagacacaaccgccgttcttttaaaacacctgatgggcagcagaagcaattactgcccagatggtatttttactatcttggcacagggccccatgctggagccagttatggagacagcattgaaggcgtcttttgggttgcaaacagccaagcggacaccaatacccgctctgatattgtcgaaagggacccaagcagtcatgaggctattcctactaggtttgcgcccggcacggtattgcctcagggcttttatgttgaaggctctggaaggtctgccccggccagccgatctggttcgcggtcacaatcccgtgggccaaataatcgcgctagaagcagttccaaccagcgccagcctgcctctactgtaaaacctgatatggccgaagaaattgctgctcttgttttggctaagctcggtaaagatgccggccagcccaagcaagtaacgaagcaaagtgccaaagaagtcaggcagaaaattttaaacaagcctcgccaaaagaggactccaaacaagcagtgcccagtgcagcagtgttttggaaagagaggccccaatcagaattttggaggctctgaaatgttaaaacttggaactagtgatccacagttccccattcttgcagagttggctccaacagttggtgccttcttctttggatctaaattagaattggtcaaaaagaattctggtggtgctgatgaacccaccaaagatgtgtatgagctgcaatattcaggtgcagttagatttgatagtactctacctggttttgagactatcatgaaagtgttgaatgagaatttgaatgcctaccagaaggatggtggtgcagatgtggtgagcccaaagccccaaagaaaagggcgtagacaggctcaggaaaagaaagatgaagtagataatgtaagcgttgcaaagcccaaaagctctgtgcagcgaaatgtaagtagagaattaaccccagaggatagaagtctgttggctcagatccttgatgatggcgtagtgccagatgggttagaagatgactctaatgtgtaaagagaatgaatcctatgtcggcgctcggtggtaacccctcgcgagaaagtcgggataggacactctctatcagaatggatgtcttgctgtcataacagatagagaaggttgtggcagaccctgtatcaattagttgaaagagattgcaaaatagagaatgtgtgagagaagttagcaaggtcctacgtctaaccataagaacggcgataggcgccccctgggaacagctcacatcagggtactattcctgcaatgccctagtaaatgaatgaagttgatcatggccaattggaagaatcac

SEQ ID NO: 17 - DNA, 3822 bp, Artificial Sequence
  COVAX-S19-1
atgtttgtttttcttgttttattgccactagtctctagtcagtgtgttaatcttacaaccagaactcaattaccccctgcatacactaattctttcacacgtggtgtttattaccctgacaaagttttcagatcctcagttttacattcaactcaggacttgttcttacctttcttttccaatgttacttggttccatgctatacatgtctctgggaccaatggtactaagaggtttgataaccctgtcctaccatttaatgatggtgtttactttgcttccactgagaagtctaacataataagaggctggatttttggtactactttagattcgaaaacccagtccctacttattgttaataacgctactaatgttgttatcaaagtctgtgaatttcaattttgtaacgatccatttttgggtgtttattaccacaaaaacaacaaaagttggatggaaagtgagttcagagtttattctagtgcgaataattgcacttttgaatacgtctctcagccttttcttatggaccttgaaggaaaacagggtaatttcaaaaatcttagggaatttgtgttcaagaatattgatggttacttcaagatatactctaagcacacgcctattaatttagtgcgtgatctccctcagggtttttcggctttagaaccattggtagatttgccaataggtattaacatcactaggtttcaaactttacttgctttacatagaagttatttaactcctggtgattcttcttcaggttggacagctggtgctgcagcttattatgtgggttatcttcaacctaggacttttctactgaagtacaatgaaaatggaaccattacagatgctgtagactgtgcacttgaccctctctcagaaacaaagtgtacgttgaaatccttcactgtagaaaaaggaatctatcaaacttctaactttagagtccaaccaacagaatctattgttagatttcctaacatcacaaacttgtgcccttttggtgaagtttttaacgccaccagatttgcatctgtttatgcttggaacaggaagagaatcagcaactgtgttgctgattattctgtcctgtataattccgcatcattttccacttttaagtgttatggagtgtctcctactaaattaaatgatctctgctttactaatgtctatgcagattcatttgtaattagaggtgatgaagtcagacaaatcgctccagggcaaactggaaagattgctgattataactacaaattaccagatgattttacaggctgcgttatagcttggaattctaacaatcttgattctaaggttggtggtaattataattacctgtacagattgtttaggaagtctaatctcaaaccttttgagagagatatttcaactgaaatctatcaggccggtagcacaccttgtaatggtgttgaaggttttaattgttactttcctctgcaatcatatggtttccaacccactaatggtgttggttaccaaccatacagagtagtagtactttcttttgaacttctacatgcaccagcaactgtttgtggacctaaaaagtctactaatttggttaagaacaagtgtgtcaatttcaacttcaatggtttaacaggcacaggtgttcttactgagtctaacaaaaagtttctgcctttccaacaatttggcagagacattgctgacactactgatgctgttcgtgatccacaaacacttgagattcttgacattacaccatgttcttttggtggtgtcagtgttataacaccaggaacaaatacttctaaccaggttgctgttctttatcaggatgttaactgcacagaagtccctgttgctattcatgcagatcaacttactcctacttggcgtgtttattctacaggttctaatgtttttcaaacacgtgcaggctgtttaataggggctgaacatgtcaacaactcatatgagtgtgacatacccattggtgcaggtatatgcgctagttatcagactcagactaattctcctcggagagcaagaagtgtagctagtcaatccatcattgcctacactatgtcacttggtgcagaaaattcagttgcttactctaataactctattgccatacccacaaattttactattagcgttaccacagaaattctaccagtgtctatgaccaagacatcagtagattgtacaatgtacatttgtggtgattcaactgaatgcagcaatcttttgttgcaatatggcagtttttgtacacaattaaaccgtgctttaactggaatagctgttgaacaagacaaaaacacccaagaagtttttgcacaagtcaaacaaatttacaagacaccaccaattaaagattttggcggttttaattttagccagatactgccagatccatcaaaaccaagcaagaggtcatttattgaagatctactgttcaacaaagtgacacttgcagatgctggcttcatcaaacaatatggtgattgccttggtgatattgctgctagagacctcatttgtgcacaaaagtttaacggccttactgttttgccacctttgctcacagatgaaatgattgctcaatacacttctgcactgttagcaggtacaatcacttctggttggacttttggtgcaggtgctgcattacaaataccatttgctatgcaaatggcttataggtttaatggtattggagttacacagaatgttctctatgagaaccaaaaattgattgccaaccaatttaatagtgctattggcaaaattcaagactcactttcttccacagcaagtgcacttggaaaacttcaagatgtggtcaaccaaaatgcacaagctttaaacacgcttgttaaacaacttagctccaattttggtgcaatttcaagtgttttaaacgacatcctttcacgtcttgacaaagttgaggctgaagtgcaaattgataggttgatcacaggcagacttcaaagtttgcagacatatgtgactcaacaattaattagagctgcagaaatcagagcttctgctaatcttgctgctactaaaatgtcagagtgtgtacttggacaatcaaaaagagttgacttttgcggaaagggctatcatcttatgtcatttcctcagtcagcacctcatggtgtcgtctttttgcatgtgacttatgtccctgcacaagaaaagaacttcacaactgctcctgccatttgtcatgatggaaaagcacactttcctcgtgaaggtgtctttgtttcaaatggcacacactggtttgtaacacaaaggaatttttatgaaccacaaatcattactacagacaacacatttgtgtctggtaactgtgatgttgtaataggaattgtcaacaacacagtttatgatcctttgcaacctgaattagactcattcaaggaggagcttgataaatacttcaagaaccatacctcaccagatgttgatttaggtgacatctctggcattaatgcttcagttgtaaacattcagaaagaaatcgaccgcctcaatgaggttgccaagaatttaaatgaatctctcatcgatctccaagaacttggaaagtatgagcagtatataaaatggccatggtacatttggctaggttttatagctggcttgattgccatagtaatggtgacaattatgctttgctgtatgaccagttgctgtagttgtctcaagggctgttgttcttgtggatcctgctgcaaatttgacgaggacgactctgagccagtgctcaaaggagtcaaattacattacacataa

SEQ ID NO: 18 - protein, 1273 aa, Artificial Sequence
  S-Protein_Sars-CoV2
MFVFLVLLPLVSSQCVNLTTRTQLPPAYTNSFTRGVYYPDKVFRSSVLHSTQDLFLPFFSNVTWFHAIHVSGTNGTKRFDNPVLPFNDGVYFASTEKSNIIRGWIFGTTLDSKTQSLLIVNNATNVVIKVCEFQFCNDPFLGVYYHKNNKSWMESEFRVYSSANNCTFEYVSQPFLMDLEGKQGNFKNLREFVFKNIDGYFKIYSKHTPINLVRDLPQGFSALEPLVDLPIGINITRFQTLLALHRSYLTPGDSSSGWTAGAAAYYVGYLQPRTFLLKYNENGTITDAVDCALDPLSETKCTLKSFTVEKGIYQTSNFRVQPTESIVRFPNITNLCPFGEVFNATRFASVYAWNRKRISNCVADYSVLYNSASFSTFKCYGVSPTKLNDLCFTNVYADSFVIRGDEVRQIAPGQTGKIADYNYKLPDDFTGCVIAWNSNNLDSKVGGNYNYLYRLFRKSNLKPFERDISTEIYQAGSTPCNGVEGFNCYFPLQSYGFQPTNGVGYQPYRVVVLSFELLHAPATVCGPKKSTNLVKNKCVNFNFNGLTGTGVLTESNKKFLPFQQFGRDIADTTDAVRDPQTLEILDITPCSFGGVSVITPGTNTSNQVAVLYQDVNCTEVPVAIHADQLTPTWRVYSTGSNVFQTRAGCLIGAEHVNNSYECDIPIGAGICASYQTQTNSPRRARSVASQSIIAYTMSLGAENSVAYSNNSIAIPTNFTISVTTEILPVSMTKTSVDCTMYICGDSTECSNLLLQYGSFCTQLNRALTGIAVEQDKNTQEVFAQVKQIYKTPPIKDFGGFNFSQILPDPSKPSKRSFIEDLLFNKVTLADAGFIKQYGDCLGDIAARDLICAQKFNGLTVLPPLLTDEMIAQYTSALLAGTITSGWTFGAGAALQIPFAMQMAYRFNGIGVTQNVLYENQKLIANQFNSAIGKIQDSLSSTASALGKLQDVVNQNAQALNTLVKQLSSNFGAISSVLNDILSRLDKVEAEVQIDRLITGRLQSLQTYVTQQLIRAAEIRASANLAATKMSECVLGQSKRVDFCGKGYHLMSFPQSAPHGVVFLHVTYVPAQEKNFTTAPAICHDGKAHFPREGVFVSNGTHWFVTQRNFYEPQIITTDNTFVSGNCDVVIGIVNNTVYDPLQPELDSFKEELDKYFKNHTSPDVDLGDISGINASVVNIQKEIDRLNEVAKNLNESLIDLQELGKYEQYIKWPWYIWLGFIAGLIAIVMVTIMLCCMTSCCSCLKGCCSCGSCCKFDEDDSEPVLKGVKLHYT

SEQ ID NO: 19 - DNA, 4486 bp, Artificial Sequence
  COVAX-S19-2
acgaacttatggatttgtttatgagaatcttcacaattggaactgtaactttgaagcaaggtgaaatcaaggatgctactccttcagattttgttagagctactgcaacgataccgatacaagcatcacttcctttcggatggcttattgttggcgttgcacttcttgctgtttttcagagcgcttccaaaatcataaccctcaaaaagagatggcaactagcactctccaagggtgttcactttgtttgcaacttgctgttgttgtttgtaacagtttactcacatcttttgcttgttgctgctggccttgaagccccttttctctatctttatgctttagtctacttcttgcagagtataaactttgtacgcataataatgaggctttggctttgctggaaatgccgttccaaaaacccattactttatgatgccaactattttctttgctggcatactaattgttacgactattgtataccttacaatagtgtaacttcttcaattgtcattacttcaggtgatggcacaacaagtcctatttctgaacatgactaccagattggtggttatactgaaaaatgggaatctggagtaaaagactgtgttgtattacacagttacttcacttcagactattaccagctgtactcaactcaattgagtacagacactggtgttgaacatgttaccttcttcatctacaataaaatcgttgatgagcctgaagaacatgtccaaattcacacaatcgacggttcatccggagttgttaatccagtaatggaaccaatttatgatgaaccgacgacgactactagcgtgcctttgtaagcacaagctgatgagtacgaacttatgtactcattcgtttcggaagagacaggtacgttaatagttaatagcgtacttctttttcttgctttcgtggtattcttgctagttacactagccattcttactgcgcttcgattgtgtgcgtactgttgcaatattgttaacgtgagtcttgtaaaaccttctttttacgtttactctcgtgttaaaaatctgaattcttctcgggttcctgatcttctggtctaaacgaactaaatattatattagtttttctgtttggaactttaattttagccatggcagattccaacggtactattaccgttgaggagctgaaaaagctccttgaacaatggaacctagtaataggtttcctattccttacatggatttgcctgctgcaatttgcctatgccaacaggaataggtttttgtacatcattaagttgattttcctctggctgttatggccagtaactttagcttgttttgtgcttgctgctgtttacagaataaattggatcaccggtggaattgctattgcaatggcttgtcttgtaggattgatgtggctaagctacttcattgcttctttcagactgtttgcgcgtacgcgttccatgtggtcattcaatccagaaactaacattcttctcaacgtgccactccatggaactattctgactagaccgcttctagaaagtgaactcgtaatcggagctgttatccttcgtggacatcttcgtattgctggacatcatctaggacgctgtgacatcaaggatctacctaaagaaatcactgttgctacatcacgaacgctttcttattacaaattgggagcttcacagcgtgtagcaggtgattcaggttttgctgcatatagtcgctacaggattggcaactataaattaaacacagaccattccagtagcagtgacaatattgctttgcttgtacagtaagtgacaacagatgtttcatctcgttgactttcaggttactatagcagagatattactaatcatcatgaggacttttaaagtttccatttggaatcttgattacatcataaacctcataattaagaacttaagcaagtcactaactgagaataaatattctcaactagacgaggagcagccaatggagattgattaaacgaacatgaaaattattcttttcttggcactgataacactcgctacttgtgagctttatcactaccaagagtgtgttagaggtacaacagtacttttaaaagaaccttgctcgtcgggaacatacgagggcaattcaccatttcatcctctagctgataacaaatttgcactgacttgctttagcactcaatttgcttttgcttgtcctgacggcgtaaaacacgtctatcagttacgtgccagatcagtttcacctaaactgttcatcagacaagaggaagttcaagaactttactctccaatttttcttattgttgcggcaatagtgtttataacactttgcttcacactcaaaagaaagacagaatgattgaactttcattaattgacttctatttgtgctttttagcctttctgctattccttgttttaattatgcttattatcttttggttctcacttgaactgcaagatcataatgaaacttgtcacgcctaaacgaacatgaaatttcttgttttcttaggaatcatcacaactgtagctgcatttcaccaagaatgtagtttacagtcatgtactcaacatcaaccatatgtagttgatgacccgtgtcctattcacttctattctaaatggtatatcagagtaggagctagaaaatcagcacctttaattgaattgtgcgtggatgaggctggttctaaatcacccattcagtacatcgatatcggtaattatacagtttcctgtttaccttttacaattaactgccaggaacctaaattgggtagtcttgtagtgcgttgttcgttctacgaggactttttagagtatcatgacgttcgtgttgttttagatttcatctaaacgaacaaactaaaatgtctgataatggacctcaaaatcagcgaaatgcacctcgcattacgtttggtggaccatcagattcaactggcagtaaccagaatggagaacgaagtggtgcgcgatcaaaacaacgccgcccgcaaggtttacccaataatactgcgtcttggttcaccgctctcactcaacatggcaaggaagatttaaaattccctcgaggacaaggcgttccaattaacaccaatagcagtccagatgaccaaattggctactaccgccgcgccacaagacgaattcgtggtggtgatggtaaaatgaaagatctcagtccaagatggtatttctactatctaggaactgggccagaagctggacttccttatggtgctaacaaagatggcatcatatgggttgcaactgagggagccttgaatacaccaaaagatcacattggcaccagaaatcctgctaacaatgctgcaatcgtgctacaacttcctcaaggaacaacattaccaaaaggtttttacgcagaagggtctagaggtggaagtcaagcctcttctagatcatcatcacgtagtcgcaacagttcaagaaattcaactccaggttcaagtagaggaacttctcctgctagaatggctggaaatggaggtgatgctgctcttgctttgttactacttgacagattgaaccagcttgagagcaaaatgtctggtaaaggccaacaacaacaaggccaaactgtcactaagaaatctgctgctgaggcttctaagaagcctagacaaaaacgtactgccactaaagcatacaatgtaacacaagctttcggcagacgtggtccagaacaaactcaaggaaattttggggatcaggaactaatcagacaaggaactgattacaaacattggccgcaaattgcacaatttgctccttctgcttcagcgttctttggaatgtcgagaattggaatggaagtcacaccttcgggaacatggttgacctatacaggtgccatcaaattggatgacaaagatccaaatttcaaagatcaagtcattttgctgaataagcatattgacgcatacaaaacattcccaccaacagagcctaaaaaggacaaaaagaagaaggctgatgaaactcaagccttaccgcagagacagaagaaacagcaaactgtgactcttcttcctgctgcagatttggatgatttctccaaacaattgcaacaatccatgagcagtgctgactcaactcaggcctaaactcatgcagaccacacaaggcagatgggctatataaacgttttcgcttttccgtttacgatatatagtctactcttgtgcagaatgaattctcgtaactacatagcacaagtagatgtagttaactttaatctcacatagcaatctttaatcagtgtgtaacattagggaggacttgaaagagccaccacattttcaccgaggccacgcggagtacgatcgagtgtacagtgaacaatgctagggagagctgcctatatggatgagccctaatgtgtaaaattaattttagtagtgctatccccatgtgattttaatagcttcttaggagaatgac

SEQ ID NO: 20 - protein, 275 aa, Artificial Sequence
  Synthetic_ORF3a_Protein
MDLFMRIFTIGTVTLKQGEIKDATPSDFVRATATIPIQASLPFGWLIVGVALLAVFQSASKIITLKKRWQLALSKGVHFVCNLLLLFVTVYSHLLLVAAGLEAPFLYLYALVYFLQSINFVRIIMRLWLCWKCRSKNPLLYDANYFLCWHTNCYDYCIPYNSVTSSIVITSGDGTTSPISEHDYQIGGYTEKWESGVKDCVVLHSYFTSDYYQLYSTQLSTDTGVEHVTFFIYNKIVDEPEEHVQIHTIDGSSGVVNPVMEPIYDEPTTTTSVPL

SEQ ID NO: 21 - protein, 75 aa, Artificial Sequence
  Synthetic_Structural_Protein_E
MYSFVSEETGTLIVNSVLLFLAFVVFLLVTLAILTALRLCAYCCNIVNVSLVKPSFYVYSRVKNLNSSRVPDLLV

SEQ ID NO: 22 - protein, 222 aa, Artificial Sequence
  Synthetic_Membrane_Glycoprotein_M
MADSNGTITVEELKKLLEQWNLVIGFLFLTWICLLQFAYANRNRFLYIIKLIFLWLLWPVTLACFVLAAVYRINWITGGIAIAMACLVGLMWLSYFIASFRLFARTRSMWSFNPETNILLNVPLHGTILTRPLLESELVIGAVILRGHLRIAGHHLGRCDIKDLPKEITVATSRTLSYYKLGASQRVAGDSGFAAYSRYRIGNYKLNTDHSSSSDNIALLVQ

SEQ ID NO: 23 - protein, 61 aa, Artificial Sequence
  Synthetic_ORF6_Protein
MFHLVDFQVTIAEILLIIMRTFKVSIWNLDYIINLIIKNLSKSLTENKYSQLDEEQPMEID

SEQ ID NO: 24 - protein, 121 aa, Artificial Sequence
  Synthetic_ORF7a_Protein
MKIILFLALITLATCELYHYQECVRGTTVLLKEPCSSGTYEGNSPFHPLADNKFALTCFSTQFAFACPDGVKHVYQLRARSVSPKLFIRQEEVQELYSPIFLIVAAIVFITLCFTLKRKTE

SEQ ID NO: 25 - protein, 121 aa, Artificial Sequence
  Synthetic_ORF8_Protein
MKFLVFLGIITTVAAFHQECSLQSCTQHQPYVVDDPCPIHFYSKWYIRVGARKSAPLIELCVDEAGSKSPIQYIDIGNYTVSCLPFTINCQEPKLGSLVVRCSFYEDFLEYHDVRVVLDFI

SEQ ID NO: 26 - protein, 419 aa, Artificial Sequence
  Synthetic_Nulceocapsid_Phosphoprotein
MSDNGPQNQRNAPRITFGGPSDSTGSNQNGERSGARSKQRRPQGLPNNTASWFTALTQHGKEDLKFPRGQGVPINTNSSPDDQIGYYRRATRRIRGGDGKMKDLSPRWYFYYLGTGPEAGLPYGANKDGIIWVATEGALNTPKDHIGTRNPANNAAIVLQLPQGTTLPKGFYAEGSRGGSQASSRSSSRSRNSSRNSTPGSSRGTSPARMAGNGGDAALALLLLDRLNQLESKMSGKGQQQQGQTVTKKSAAEASKKPRQKRTATKAYNVTQAFGRRGPEQTQGNFGDQELIRQGTDYKHWPQIAQFAPSASAFFGMSRIGMEVTPSGTWLTYTGAIKLDDKDPNFKDQVILLNKHIDAYKTFPPTEPKKDKKKKADETQALPQRQKKQQTVTLLPAADLDDFSKQLQQSMSSADSTQA

SEQ ID NO: 27 - protein, 38 aa, Artificial Sequence
  Synthetic_ORF10_Protein
MGYINVFAFPFTIYSLLLCRMNSRNYIAQVDVVNFNLT

SEQ ID NO: 28 - DNA, 18 bp, Artificial Sequence
  T7_promotor
taatacgactcactatag

SEQ ID NO: 29 - DNA, 26 bp, Artificial Sequence
  PolyA-Element
aaaaaaaaaaaaaaaaaaaacggccg

SEQ ID NO: 30 - DNA, 21536 bp, Artificial Sequence
  COVAX-Polyprotein encoding sequence
atggcaaagatgggcaaatacggcctgggcttcaaatgggccccagaatttccatggatgcttccgaacgcatcggagaagttgggtaaccctgagaggtcagaggaggatgggttttgcccctctgctgcgcaagaaccgaaagttaaaggaaaaactttggttaatcacgtgagggtgaattgtagccggcttccagctttggaatgctgtgttcagtctgccataatccgtgatatttttgtagatgaggatccccagaaggtggaggcctcaactatgatggcattgcagttcggtagtgccgtcttggttaagccatccaagcgcttgtctattcaggcatggactaatttgggtgtgcttcccaaaacagctgccatggggttgttcaagcgcgtctgcctgtgtaacaccagggagtgctcttgtgacgcccacgtggcctttcacctttttacggtccaacccgatggtgtatgcctgggtaatggccgttttataggctggttcgttccagtcacagccataccggagtatgcgaagcagtggttgcaaccctggtccatccttcttcgtaagggtggtaacaaagggtctgtgacatccggccacttccgccgcgctgttaccatgcctgtgtatgactttaatgtagaggatgcttgtgaggaggttcatcttaacccgaagggtaagtactcctgcaaggcgtatgccctgctgaagggctatcgcggtgttaagcccatcctgtttgtggaccagtatggttgcgactatactggatgtctcgccaagggtcttgaggactatggcgatctcaccttgagtgagatgaaggagttgttccctgtgtggcgtgactccttggatagtgaagtccttgtggcttggcacgttgatcgagatcctcgggctgctatgcgtctgcagactcttgctactgtacgttgcattgattatgtgggccaaccgaccgaggatgtggtggatggagatgtggtagtgcgtgagcctgctcatcttctcgcagccaatgccattgttaaaagactcccccgtttggtggagactatgctgtatacggattcgtccgttacagaattctgttataaaaccaagctgtgtgaatgcggttttatcacgcagtttggctatgtggattgttgtggtgacacctgtgattttcgtgggtgggttgccggcaatatgatggatggctttccatgtccagggtgtaccaaaaattatatgccctgggaattggaggcccagtcatcaggtgttataccagaaggaggtgttctattcactcagagcactgatacagtgaatcgtgagtcctttaagctctacggtcatgctgttgtgccttttggttctgctgtgtattggagcccttgcccaggtatgtggcttccagtaatttggtcgtcggttaagtcatactctggtttgacttatacaggagtagttggttgtaaggcaattgttcaagagacagacgctatatgtcgttctctgtatatggattatgtccagcacaagtgtggcaatctcgagcagagagctatccttggattggacgatgtctatcatagacagttgcttgtgaataggggtgactatagtctcctccttgagaatgtggatttgtttgttaagcggcgcgctgaatttgcttgcaaattcgccacctgtggagatggtcttgtacccctcctactagatggtttagtgccccgcagttattatttgattaagagtggtcaagctttcacctctatgatggttaattttagccatgaggtgactgacatgtgtatggacatggctttattgttcatgcatgatgttaaagtggccactaagtatgttaagaaggttactggcaaactggccgtgcgctttaaagcgttgggtgtagccgttgtcagaaaaattactgaatggtttgatttagccgtggacattgctgctagtgccgctggatggctttgctaccagctggtaaatggcttatttgcagtggccaatggtgttataacctttgtacaggaggtgcctgagcttgtcaagaattttgttgacaagttcaaggcatttttcaaggttttgatcgactctatgtcggtttctatcttgtctggacttactgttgtcaagactgcctcaaatagggtgtgtcttgctggcagtaaggtttatgaagttgtgcagaaatctttgtctgcatatgttatgcctgtgggttgcagcgaagccacttgtttggtgggtgagattgaacctgcagtttttgaagatgatgttgttgatgtggttaaagccccattaacatatcaaggctgttgtaagccacccacttctttcgagaagatttgtattgtggataaattgtatatggccaagtgtggtgatcaattttaccctgtggttgttgataacgacactgttggcgtgttagatcagtgctggaggtttccctgtgcgggcaagaaagtcgagtttaacgacaagcccaaagtcaggaagataccctccacccgtaagattaagatcaccttcgcactggatgcgacctttgatagtgttctttcgaaggcgtgttcagagtttgaagttgataaagatgttacattggatgagctgcttgatgttgtgcttgacgcagttgagagtacgctcagcccttgtaaggagcatgatgtgataggcacaaaagtttgtgctttacttgataggttggcaggagattatgtctatctttttgatgagggaggcgatgaagtgatcgccccgaggatgtattgttccttttctgctcctgatgacgaggactgcgttgcagcggatgttgtagatgcagatgaaaaccaagatgatgatgccgaggactcagcagtccttgtcgctgatacccaagaagaggacggcgttgccaaggggcaggttgaggcggattcggaaatttgcgttgcgcatactggtagtcaagaagaattggctgagcctgatgctgtcggatctcaaactcccatcgcctctgctgaggaaaccgaagtcggagaggcaagcgacagggaagggattgctgaggcgaaggcaactgtgtgtgctgatgctgtagatgcctgccccgatcaagtggaggcatttgaaattgaaaaggtcgaggactctatcttggatgagcttcaaactgaacttaatgcgccagcggacaagacctatgaggatgtcttggcattcgatgccgtatgctcagaggcgttgtctgcattctatgctgtgccgagtgatgagacgcactttaaagtgtgtggattctattcgcctgctatagagcgcactaattgttggctgcgttctactttgatagtaatgcagagtctacctttggaatttaaagacttggagatgcaaaagctctggttgtcttacaaggccggctatgaccaatgctttgtggacaaactagttaagagcgtgcccaagtctattatccttccacaaggtggttatgtggcagattttgcctatttctttctaagccagtgtagctttaaagcttatgctaactggcgttgtttagagtgtgacatggagttaaagcttcaaggcttggacgccatgtttttctatggggacgttgtgtctcatatgtgcaagtgtggtaatagcatgaccttgttgtctgcagatataccctacactttgcattttggagtgcgagatgataagttttgcgctttttacacgccaagaaaggtctttagggctgcttgtgcggtagatgttaatgattgtcactctatggctgtagtagagggcaagcaaattgatggtaaagtggttaccaaatttattggtgacaaatttgattttatggtgggttacgggatgacatttagtatgtctccttttgaactcgcccagttatatggttcatgtataacaccaaatgtttgttttgttaaaggagatgttataaaggttgttcgcttagttaatgctgaagtcattgttaaccctgctaatgggcgtatggctcatggtgccggcgtcgccggcgccatagctgaaaaggcgggcagtgcttttattaaagaaacctccgatatggtgaaggctcagggcgtttgccaggttggtgaatgctatgaatctgccggtggtaagttatgtaaaaaggtgcttaacattgtagggccagatgcgcgagggcatggcaagcaatgctattcacttttagagcgtgcttatcagcatattaataagtgtgacaatgttgtcactactttaatttcggctggtatatttagtgtgcctactgatgtctccctaacttacttacttggtgtagtgacaaagaatgtcattcttgtcagtaacaaccaggatgattttgatgtgatagagaagtgtcaggtgacctccgttgctggtaccaaagcgctatcacttcaattggccaaaaatttgtgccgtgatgtaaagtttgtgacgaatgcatgtagttcgctttttagtgaatcttgctttgtctcaagctatgatgtgttgcaggaagttgaagcgctgcgacatgatatacaattggatgatgatgctcgtgtctttgtgcaggctaatatggactgtctgcccacagactggcgtctcgttaacaaatttgatagtgttgatggtgttagaaccattaagtattttgaatgcccgggcgggatttttgtatccagccagggcaaaaagtttggttatgttcagaatggttcatttaaggaggcgagtgttagccaaataagggctttactcgctaataaggttgatgtcttgtgtactgttgatggtgttaacttccgctcctgctgcgtagcagagggtgaagtttttggcaagacattaggttcagtcttttgtgatggcataaatgtcaccaaagttaggtgtagtgccatttacaagggtaaggttttctttcagtacagtgatttgtccgaggcagatcttgtggctgttaaagatgcctttggttttgatgaaccacaactgctgaagtactacactatgcttggcatgtgtaagtggccagtagttgtttgtggcaattattttgctttcaagcagtcaaataataattgctacatcaacgtggcatgtttaatgctgcaacacttgagtttaaagtttcctaagtggcaatggcaagaggcttggaacgagttccgctctggtaaaccactaaggtttgtgtccttggtattagcaaagggcagctttaaatttaatgaaccttctgattctatcgattttatgcgtgtggtgctacgtgaagcagatttgagtggtgccacgtgcaatttggaatttgtttgtaaatgtggtgtgaagcaagagcagcgcaaaggtgttgacgctgttatgcattttggtacgttggataaaggtgatcttgtcaggggttataatatcgcatgtacgtgcggtagtaaacttgtgcattgcacccaatttaacgtaccatttttaatttgctccaacacaccagagggtaggaaactgcccgacgatgttgttgcagctaatatttttactggtggtagtgtgggccattacacgcatgtgaaatgtaaacccaagtaccagctttatgatgcttgtaatgttaataaggtttcggaggctaagggtaattttaccgattgcctctaccttaaaaatttaaagcaaaccttctcgtctgtgctgacgactttttatttagatgacgtaaagtgtgtggagtataagccagatttatcgcagtattactgtgagtctggtaaatattatacaaaacccattattaaggcccaatttagaacatttgagaaggttgatggtgtctataccaactttaaattggtgggacatagtattgctgaaaaactcaatgctaagctgggatttgattgtaattctccctttgtggagtataaaattacagagtggccaacagctactggagatgtggtgttggctagtgatgatttgtatgtaagtcggtacttaagcgggtgcattacttttggtaaaccggttgtctggcttggccatgaggaagcatcgctgaaatctctcacatattttaatagacctagtgtcgtttgtgaaaataaatttaacgtgttgcccgttgatgtcagtgaacccacggacaaggggcctgtgcctgctgcagtccttgttaccggcgtccctggagctgatgcgtcagctggtgccggtattgccaaggagcaaaaagcctgtgcttctgctagtgtggaggatcaggttgttacggaggttcgtcaagagccatctgtttcagctgctgatgtcaaagaggttaaattgaatggtgttaaaaagcctgttaaggtggaaggtagtgtggttgttaatgatcccactagcgaaaccaaagttgttaaaagtttgtctattgttgatgtctatgatatgttcctgacagggtgtaagtatgtggtttggactgctaatgagttgtctcgactagtaaattcaccgactgttagggagtatgtgaagtggggtatgggaaagattgtaacacccgctaagttgttgttgttaagagatgagaagcaagagttcgtagcgccaaaagtagtcaaggcgaaagctattgcctgctattgtgctgtgaagtggtttctcctctattgttttagttggataaagtttaatactgacaataaggttatatacaccacagaagtagcttcaaagcttactttcaagttgtgctgtttggcctttaagaatgccttacagacgtttaattggagcgttgtgtctaggggctttttcctagttgcaacggtctttttactctggtttaactttttgtatgctaatgttattttgagtgacttctatttgcctaatattgggcctctccctacgtttgtgggacagatagttgcgtggtttaagactacatttggtgtgtcaaccatctgtgatttctaccaggtgacggatttgggctatagaagttcgttttgtaatggaagtatggtatgtgaactatgcttctcaggttttgatatgctggacaactatgatgctataaatgttgttcaacacgttgtagataggcgtttgtcctttgactatattagcctatttaaactggtagttgagcttgtaatcggctactctctttatactgtgtgcttctacccactgtttgtccttattggaatgcagttattgaccacatggttgcctgaattctttatgctggagactatgcattggagtgctcgtttgtttgtgtttgttgccaatatgcttccagcttttacgttactgcgattttacatcgtggtgacagctatgtataaggtctattgtctttgtagacatgttatgtatggatgtagtaagcctggttgcttgttttgttataagagaaaccgtagtgtccgtgttaagtgtagcaccgttgttggtggttcactacgctattacgatgtaatggctaacggcggcacaggtttctgtacaaagcaccagtggaactgtcttaattgcaattcctggaaaccaggcaatacattcataactcatgaagcagcggcggacctctctaaggagttgaaacgccctgtgaatccaacagattctgcttattactcggtcacagaggttaagcaggttggttgttccatgcgtttgttctacgagagagatggacagcgtgtttatgatgatgttaatgctagtttgtttgtggacatgaatggtctgctgcattctaaagttaaaggtgtgcctgaaacgcatgttgtggttgttgagaatgaagctgataaagctggttttctcggcgccgcagtgttttatgcacaatcgctctacagacctatgttgatggtggaaaagaaattaataactaccgccaacactggtttgtctgttagtcgaactatgtttgacctttatgtagattcattgctgaacgtcctcgacgtggatcgcaagagtctaacaagttttgtaaatgctgcgcacaactctctaaaggagggtgttcagcttgaacaagttatggatacctttattggctgtgcccgacgtaagtgtgctatagattctgatgttgaaaccaagtctattaccaagtccgtcatgtcggcagtaaatgctggcgttgattttacggatgagagttgtaataacttggtgcctacctatgttaaaagtgacactatcgttgcagccgatttgggtgttcttattcagaataatgctaagcatgtacaggctaatgttgctaaagccgctaatgtggcttgcatttggtctgtggatgcttttaaccagctatctgctgacttacagcataggctgcgaaaagcatgttcaaaaactggcttgaagattaagcttacttataataagcaggaggcaaatgttcctattttaactacaccgttctctcttaaagggggcgctgtttttagtagaatgttacaatggttgtttgttgctaatttgatttgtttcattgtgttgtgggcccttatgccaacatatgcagtgcacaaatcggatatgcagttgcctttatatgccagttttaaagttatagataacggtgtgctaagggatgtgtctgttactgacgcatgcttcgcaaacaaatttaatcaattcgaccaatggtatgagtctacttttggtcttgcttattaccgcaactctaaggcttgtcctgttgtggttgctgtaatagatcaagacattggccataccttatttaatgttcctaccacagttttaagatatggatttcatgtgttgcattttataacccatgcatttgctactgatagcgtgcagtgttacacgccacatatgcaaatcccctatgataatttctatgctagtggttgcgtgttgtcatccctctgtactatgcttgcgcatgcagatggaaccccgcatccttattgttatacagggggtgttatgcataatgcctctctgtatagttctttggctcctcatgtccgttataacctggctagttcaaatggttatatacgttttcccgaagtggttagtgaaggcattgtgcgtgttgtgcgcactcgctctatgacctactgcagggttggtttatgtgaggaggccgaggagggtatctgctttaattttaatcgttcatgggtattgaacaacccgtattatagggccatgcctggaactttttgtggtaggaatgcttttgatttaatacatcaagttttaggaggattagtgcggcctattgatttctttgccttaacggcgagttcagtggctggtgctatccttgcaattattgtcgttttggctttctattatttaatcaagcttaagcgtgcctttggtgactacactagtgttgtggttatcaatgtaattgtgtggtgtataaattttctgatgctttttgtgtttcaggtttatcccacattgtcttgtttatatgcttgtttctacttctacaccacgctttatttcccttcggagataagtgttgttatgcatttgcaatggcttgtcatgtatggtgctattatgcccttgtggttttgcattatttacgtggcagtcgttgtttcaaaccatgcattgtggttgttctcttactgccgcaaaattggtaccgaggttcgtagtgacggcacatttgaggaaatggcccttactacctttatgattactaaagaatcttattgtaagttgaaaaactctgtttctgatgttgcttttaacaggtacttgagtctttacaacaagtaccgttacttcagtggcaaaatggatactgccgcttatagagaggctgcctgttcacaactggcaaaggcaatggaaacatttaaccataataatggtaatgatgttctctatcagcctccaaccgcctctgttactacatcatttttacagtctggtatagtgaagatggtgtcgcccacctctaaagtggagccttgtattgttagtgttacttatggtaacatgacacttaatgggttgtggttggatgataaagtttattgcccaagacatgttatctgttcttcagctgacatgacagaccctgattatcctaatttgctttgtagagtgacatcaagtgatttttgtgttatgtctggtcgtatgagccttactgtaatgtcttatcaaatgcagggctgccaacttgttttgactgttacactgcaaaatcctaacacgcctaagtattccttcggtgttgttaagcctggtgagacatttactgtactggctgcatacaatggcagacctcaaggagccttccatgttacgcttcgtagtagccataccataaagggctcctttctatgtggatcctgcggttctgtaggatatgttttaactggcgatagtgtacgatttgtttatatgcatcagctagagttgagtactggttgtcataccggtactgactttagtgggaacttttatggtccctatagagatgcgcaagttgtacaattgcctgttcaggattatacgcagactgttaatgttgtagcttggctttatgctgctatttttaacagatgcaactggtttgtgcaaagtgatagttgttccctggaggagtttaatgtttgggctatgaccaatggttttagctcaatcaaagccgatcttgtcttggatgcgcttgcttctatgacaggcgttacagttgaacaggtgttggccgctattaagaggctgcattctggattccagggcaaacaaattttaggtagttgtgtgcttgaagatgagctgacaccaagtgatgtttatcaacaactagctggtgtcaagctacagtcaaagcgcacaagagttataaaaggtacatgttgctggatattggcttcaacgtttttgttctgtagcattatctcagcatttgtaaaatggactatgtttatgtatgttactacccatatgttgggagtgacattgtgtgcactttgttttgtaagctttgctatgttgttgatcaagcataagcatttgtatttaactatgtacatcatgcctgtgttatgcacactgttttacaccaactatttggttgtgtacaaacagagttttagaggtctagcttatgcttggctttcacactttgtccctgctgtagattatacatatatggatgaagttttatatggtgttgtgttgctagtagctatggtgtttgttaccatgcgtagcataaaccacgacgtcttttctattatgttcttggttggtagacttgtcagcctggtatccatgtggtattttggagccaatttagaggaagaggtactattgttcctcacatccctatttggcacgtacacatggactactatgttgtcattggctaccgctaaggttattgctaaatggttggctgtgaatgtcttgtacttcacagacgtaccgcaaattaaattagttctgttgagctacttgtgtattggttatgtgtgttgttgttattggggaatcttgtcactccttaatagcatttttaggatgccattgggcgtctacaattataaaatctccgttcaggagttacgttatatgaatgctaatggcttgcgcccacctagaaatagttttgaggccctgatgcttaattttaagctgttgggaattggtggtgtgccagtcattgaagtatctcaaattcaatcaagattgacggatgttaaatgtgctaatgttgtgttgcttaattgcctccagcacttgcatattgcatctaattctaagttgtggcagtattgtagtactttgcacaatgaaatactggctacatctgatttgagcgtggccttcgataagttggctcaactcttagttgttttatttgctaatccagcagcagtggatagcaagtgccttgcaagtattgaagaagtgagcgatgattacgttcgcgacaatactgtcttgcaagccttacagagtgaatttgttaatatggctagcttcgttgagtatgaacttgctaagaagaatctagatgaggctaaggctagcggctctgccaatcaacagcagattaagcagctagagaaggcgtgtaatattgctaagtcagcatatgagcgcgacagagctgttgctcgtaagctggaacgtatggctgatttagctcttacaaacatgtataaagaagctagaattaatgataagaagagtaaggtagtgtctgcattgcaaaccatgctctttagtatggtgcgtaagctagataaccaagctcttaattctattttagacaacgcagttaagggttgtgtacctttgaatgcaataccatcattgacttcgaacactctgactataatagtgccagataagcaggtttttgatcaggttgtggataatgtgtatgtcacctatgctgggaatgtatggcatatacagtttattcaagatgctgatggtgctgttaaacaattgaatgagatagatgttaattcaacctggcctctagtcattgctgcaaataggcataatgaagtgtctactgttgttttgcagaacaatgagttgatgcctcagaagttgagaactcaggttgtcaatagtggctcagatatgaattgtaatactcctacccagtgttactataatactactggcacgggtaagattgtgtatgctatacttagtgactgtgacggcctgaagtacactaagatagtaaaagaagatggaaattgtgttgttttggaattggatcctccctgtaagttttctgttcaggatgtgaagggccttaaaattaagtacctttactttgtgaaggggtgtaatacactggctagaggctgggttgtaggcaccttatcctcgacagtgagattgcaggcgggtacggcaactgagtatgcctccaactctgcaatactgtcgctgtgtgcgttttctgtagatcctaagaaaacgtacttggattatataaaacagggtggagttcccgttactaattgtgttaagatgttatgtgaccatgctggcactggtatggccattactattaagccggaggcaaccactaatcaggattcttatggtggtgcttccgtttgtatatattgccgctcgcgtgttgaacatccagatgttgatggattgtgcaaattacgcggcaagtttgtccaagtgcccttaggcataaaagatcctgtgtcatatgtgttgacgcatgatgtttgtcaggtttgtggcttttggcgagatggtagctgttcctgtgtaggcacaggctcccagtttcagtcaaaagacacgaactttttaaacggattcggggtacaagtgtaaatgcccgtcttgtaccctgtgccagtggcttggacactgatgttcaattaagggcatttgacatttgtaatgctaatcgagctggcattggtttgtattataaagtgaattgctgccgcttccagcgtgtagatgaggacggcaacaagttggataagttctttgttgttaaaagaactaatttagaagtgtataacaaggagaaagaatgctatgagttgacaaaagaatgcggtgttgtggctgaacacgagttcttcacatttgatgtggagggaagtcgggtaccacacatagtccgtaaagatctttcaaagtttactatgttagatctttgctatgcattgcgtcattttgaccgcaatgattgttcaactcttaaggaaattctccttacatatgctgagtgtgaagagtcctacttccaaaagaaggactggtatgattttgttgagaatcctgatataattaatgtgtacaagaagcttggtcctatatttaatagagccctgcttaacactgccaagtttgcagacgcattagtggaggcaggcttagtaggtgttttaacacttgataatcaagatttatatggtcaatggtatgactttggagattttgtcaagacagtacctggttgtggtgttgccgtggcagactcttattattcatatatgatgccaatgctgactatgtgtcatgcgttggatagtgagttgtttgttaatggtacttatagggagtttgaccttgttcagtatgattttactgatttcaagctagagctgttcactaagtattttaagcattggagtatgacctaccacccgaacacctgtgagtgcgaggatgacaggtgcattattcattgcgccaattttaatatacttttcagcatggtcttacctaagacctgttttgggcctcttgttaggcagatatttgtggatggtgttcctttcgttgtgtcgatcggttaccattataaagaattaggtgttgttatgaatatggatgtggatacacatcgttatcgcttgtctcttaaggacttgcttttgtatgctgcagaccctgcccttcatgtggcgtctgctagtgcactgcttgatttgcgcacatgttgttttagcgttgcagctattacaagtggcgtaaaatttcaaacagttaaacctggaaattttaatcaggatttctacgagtttattttgagtaaaggcctgcttaaagaggggagctccgttgatttgaagcacttcttctttacgcaggatggtaatgctgctattactgattacaattactacaagtataatctacccaccatggtggatattaagcagttgttgtttgttttagaagttgttaataagtacttcgagatctatgagggtgggtgtatacccgcaacacaggtcattgttaataattatgacaagagtgctggctatccatttaataaatttggaaaggccaggctctattatgaggcattatcatttgaggagcaggatgaaatttatgcgtataccaaacgcaatgtcctgccgaccctaactcaaatgaatcttaaatatgctattagtgctaagaatagggcccgcaccgttgctggtgtctctattctcagtactatgactggcagaatgtttcatcaaaagtgtctaaagagtatagcagctactcgcggtgttcctgtagttataggcaccacgaagttctatggcggttgggatgatatgttacgccgccttattaaagatgttgatagtcctgtactcatgggttgggactatcctaaatgtgatcgtgctatgccaaacatactgcgtattgttagtagtttggtgctagcccgtaaacatgattcgtgctgttcgcatacggatagattctatcgtcttgcgaacgagtgcgcccaagttttgagtgaaattgttatgtgtggtggttgttattatgttaaaccaggtggcactagtagtggggatgcaaccactgcttttgctaattctgtgtttaacatttgtcaagctgtttccgccaatgtatgctcgcttatggcatgcaatggacacaaaattgaagatttgagtatacgcgagttacaaaagcgcctatactctaatgtctatcgtgcggaccatgttgaccccgcatttgttagtgagtattatgagtttttaaacaagcattttagtatgatgattttgagtgatgatggtgttgtgtgttataattcagagtttgcgtccaagggttatattgctaatataagtgcctttcaacaggtattatattatcaaaacaacgtgtttatgtctgaggccaaatgttgggtagaaacagacatcgaaaagggaccgcatgaattttgttctcaacatacaatgctagtcaagatggatggtgatgaagtctaccttccataccctgatccttcgagaatcttaggagcaggctgttttgttgatgatttactcaagactgatagcgttctcttgatagagcgtttcgtaagtcttgcaattgatgcttatcctttagtataccatgagaacccagagtatcaaaatgtgttccgggtatatttagaatacatcaagaagctgtacaatgatctcggtaatcagatcctggacagctacagtgttattttaagtacttgtgatggtcaaaagtttactgacgagacgttttacaagaacatgtatttaagaagtgcagtgctgcaaagcgttggtgcctgcgttgtctgtagttctcaaacatcattacgttgtggcagttgcatacgcaagcctttgctgtgttgcaaatgcgcctatgatcatgttatgtccactgatcataaatatgtcctgagtgtgtcaccatatgtgtgtaattcaccgggatgtgatgtaaatgatgttaccaaattgtatttaggtggtatgtcatattattgtgaggaccataaaccacagtattcattcaaattggtgatgaatggtatggtttttggtttatataagcagtcttgtactggttcgccctacatagaggattttaataaaatcgctagttgcaaatggacagaagtcgatgattatgtgctagctaatgaatgcaccgaacgccttaaattgtttgccgcagaaacgcagaaggccacagaagaggcctttaagcaatgttatgcgtcagcaacgatccgtgagatcgtgagcgatcgggagttaattttatcttgggaaattggtaaagtccgcccgccacttaataaaaattacgtgttcaccggctaccattttactaataatggtaagacagttttaggtgagtatgtttttgataagagtgagttgactaatggtgtgtattatcgcgccacaaccacttataagttatctgtaggtgatgtgttcattttaacatcacacgcagtgtctagtttaagtgctcctacattagtaccgcaggagaattatactagcattcgttttgctagtgtttatagtgtgcctgagacgtttcagaataatgtgcctaattatcagcacattggaatgaagcgctattgtactgtacagggaccgcctggtactggtaagtcccatctagccattgggctagctgtttattattgtacagcgcgcgtggtgtataccgctgctagccatgctgcagttgacgcgctgtgtgaaaaggcacataaatttctcaacatcaacgactgcacgcgtattgttcctgcaaaggtgcgtgtagattgttatgataaattcaaggtcaatgacaccactcgcaagtatgtgtttactacaataaatgcattacctgagttggtgactgacattattgtcgttgatgaagttagtatgcttaccaactatgagctgtctgttattaacagtcgtgttagggctaagcattatgtgtatattggcgacccggcgcagttacctgcaccacgtgtgctactgaataagggaactctagaacctagatattttaattccgttaccaagctaatgtgttgtttgggtccagatattttcttgggcacctgttatagatgccctaaggagattgtggatacggtgtcagccttggtttataataataagctgaaggctaaaaatgataatagctccatgtgctttaaggtttattataagggccagactacacatgagagttctagtgctgttaatatgcagcaaatacatttaatttccaagtttctgaaggcaaaccccagttggagtaacgccgtatttattagtccttataactcgcagaactatgttgctaagagagtcttgggattacaaacccagacagtagactcagcgcagggttctgaatatgattttgttatctactcacagactgcggaaacagcgcattctgtcaatgtaaatagattcaatgttgctattacacgtgctaagaagggtattctctgtgtcatgagtagtatgcaattatttgagtctcttaattttactacactgacgttggataagattaacaatccacgattacagtgtactacaaatttgtttaaggattgtagcaggagctatgtaggatatcacccagcccatgcaccatcctttttggcagttgatgacaaatataaggtaggcggtgatttagccgtttgccttaatgttgctgattctgctgtcacttattcgcggcttatatcactcatgggattcaagcttgacttgacccttgatggttattgtaagctgtttataactagagatgaagctatcaaacgtgttagagcctgggttggcttcgatgcagaaggtgcccatgcgatacgtgatagcattgggacaaatttcccattacaattaggcttttcgactggaattgattttgttgtcgaagccactggaatgtttgctgagagagatggttatgtctttaaaaaggcagccgcacgagctcctcctggcgaacaatttaaacaccttatcccacttatgtcaagagggcagaaatgggatgtggttcgcattagaatagtacaaatgttgtcagaccacctagtggatttggcagacagtgttgtacttgtgacgtgggctgccagctttgagctcacatgtttgcgatatttcgctaaagttggaagagaagttgtgtgtagtgtctgcaccaagcgtgcgacatgttttaattctagaactggatactatggatgctggcgacatagttattcctgtgattacctgtacaacccactaatagttgacattcaacagtggggatatacaggatctttaactagcaatcatgatcctatttgcagcgtgcataagggtgctcatgttgcatcatctgatgctatcatgacccggtgtctagctgttcatgattgcttttgtaagtctgttaattggaatttagaataccccattatttcaaatgaggtcagtgttaatacctcctgcaggttattgcagcgcgtaatgtttagggctgcgatgctatgcaataggtatgatgtgtgttatgacattggcaaccctaaaggtcttgcctgtgtcaaaggatatgattttaagttctatgacgcctcccctgttgttaagtctgttaaacagtttgtttacaaatacgaggcacataaagatcaatttttagatggtttgtgtatgttttggaactgcaatgtggataagtatccagcgaatgcagttgtgtgtaggtttgacacgcgtgtgttgaacaaattaaatctccctggctgtaatggtggcagtttgtatgttaacaaacatgcattccacaccagtccctttacccgggctgccttcgagaatttgaagcctatgcctttcttttattattcagatacgccctgtgtgtatatggaaggcatggaatctaagcaggtcgattatgtcccattgagaagcgctacatgcatcacaagatgcaatttaggtggcgctgtttgtttaaaacatgctgaggagtatcgtgagtaccttgagtcttacaatacggcaaccacagcgggttttactttttgggtctataagacttttgatttttacaacctttggaatacttttactaggctccaaagtttagaaaatgtagtgtataacctggtcaacgctggacactttgatggccgggcgggtgaactgccttgtgctgttataggtgagaaagtcattgccaagattcaaaatgaggatgtcgtggtctttaaaaataacacgccattccccactaatgtggctgtcgaattatttgctaagcgcagtattcggccccaccccgagcttaagctctttagaaatttgaatattgacgtgtgctggagtcacgtcctttgggattatgctaaggatagtgtgttttgcagttcgacgtataaggtctgcaaatacacagatttacagtgcattgaaagcttgaatgtactttttgatggtcgtgataatggtgctcttgaagcttttaagaagtgccggaatggcgtctacattaacacgacaaaaattaaaagtctgtcgatgattaaaggcccacaacgtgccgatttgaatggcgtagttgtggagaaagttggagattctgatgtggaattttggtttgctgtgcgtaaagacggtgacgatgttatcttcagccgtacagggagccttgaaccgagccattaccggagcccacaaggtaatccgggtggtaatcgcgtgggtgatctcagcggtaatgaagctctagcgcgtggcactatctttactcaaagcagattattatcttctttcacacctcgatcagagatggagaaagattttatggatttagatgatgatgtgttcattgcaaaatatagtttacaggactacgcgtttgaacacgttgtttatggtagttttaaccagaagattattggaggtttgcatttgcttattggcttagcccgtaggcagcaaaaatccaatctggtaattcaagagttcgtgacatacgactctagcattcattcgtactttatcactgacgagaacagtggtagtagtaagagtgtgtgcactgttattgatttattgttagatgattttgtggacattgtaaagtccctgaatctaaagtgtgtgagtaaggttgttaatgttaatgtggattttaaggacttccagtttatgttgtggtgcaatgaggagaaggtcatgactttctatcctcgtttgcaggctgctgctgactggaaacctggttatgttatgcctgtcttatataagtatttggaatcgcctctggaaagagtaaacctctggaattatggcaagccgattactttacctacaggatgtatgatgaatgttgctaagtatactcaattatgtcaatatttgagcactacaacattagcagttccggctaatatgcgtgtcttacaccttggtgccggttcggataagggtgttgcccctgggtctgcagttcttaggcagtggctaccagcgggaagtattcttgtagataatgatgtgaatccatttgtgagtgacagtgtcgcctcatattatggaaattgtataaccttaccctttgattgtcagtgggatctgataatttctgatatgtacgaccctcttactaagaacattggggagtacaacgtgagtaaagatggattctttacttacctctgtcatttaattcgtgacaagttggctctgggtggcagtgttgccataaaaataacagagttttcttggaacgctgagttatatagtttaatggggaagtttgcgttctggacaatcttttgcaccaacgtaaacgcctcttcaagtgaaggatttttgattggcataaattggttgaataagacccgtaccgaaattgacggtaaaaccatgcatgccaattatctgttttggagaaatagtacaatgtggaatggaggggcttacagtctctttgacatgagtaagttccctttgaaagcggctggtacggctgttgttagccttaaaccagaccaaataaatgacttagtcctctccttgattgagaagggcaagttattagtgcgtgatacacgcaaagaagtttttgttggcgatagcctagtaaatgtcaaataa

SEQ ID NO: 31 - protein, 4470 aa, Artificial Sequence
  Synthetic_Replicative_Polyprotein_1a
MAKMGKYGLGFKWAPEFPWMLPNASEKLGNPERSEEDGFCPSAAQEPKVKGKTLVNHVRVNCSRLPALECCVQSAIIRDIFVDEDPQKVEASTMMALQFGSAVLVKPSKRLSIQAWTNLGVLPKTAAMGLFKRVCLCNTRECSCDAHVAFHLFTVQPDGVCLGNGRFIGWFVPVTAIPEYAKQWLQPWSILLRKGGNKGSVTSGHFRRAVTMPVYDFNVEDACEEVHLNPKGKYSCKAYALLKGYRGVKPILFVDQYGCDYTGCLAKGLEDYGDLTLSEMKELFPVWRDSLDSEVLVAWHVDRDPRAAMRLQTLATVRCIDYVGQPTEDVVDGDVVVREPAHLLAANAIVKRLPRLVETMLYTDSSVTEFCYKTKLCECGFITQFGYVDCCGDTCDFRGWVAGNMMDGFPCPGCTKNYMPWELEAQSSGVIPEGGVLFTQSTDTVNRESFKLYGHAVVPFGSAVYWSPCPGMWLPVIWSSVKSYSGLTYTGVVGCKAIVQETDAICRSLYMDYVQHKCGNLEQRAILGLDDVYHRQLLVNRGDYSLLLENVDLFVKRRAEFACKFATCGDGLVPLLLDGLVPRSYYLIKSGQAFTSMMVNFSHEVTDMCMDMALLFMHDVKVATKYVKKVTGKLAVRFKALGVAVVRKITEWFDLAVDIAASAAGWLCYQLVNGLFAVANGVITFVQEVPELVKNFVDKFKAFFKVLIDSMSVSILSGLTVVKTASNRVCLAGSKVYEVVQKSLSAYVMPVGCSEATCLVGEIEPAVFEDDVVDVVKAPLTYQGCCKPPTSFEKICIVDKLYMAKCGDQFYPVVVDNDTVGVLDQCWRFPCAGKKVEFNDKPKVRKIPSTRKIKITFALDATFDSVLSKACSEFEVDKDVTLDELLDVVLDAVESTLSPCKEHDVIGTKVCALLDRLAGDYVYLFDEGGDEVIAPRMYCSFSAPDDEDCVAADVVDADENQDDDAEDSAVLVADTQEEDGVAKGQVEADSEICVAHTGSQEELAEPDAVGSQTPIASAEETEVGEASDREGIAEAKATVCADAVDACPDQVEAFEIEKVEDSILDELQTELNAPADKTYEDVLAFDAVCSEALSAFYAVPSDETHFKVCGFYSPAIERTNCWLRSTLIVMQSLPLEFKDLEMQKLWLSYKAGYDQCFVDKLVKSVPKSIILPQGGYVADFAYFFLSQCSFKAYANWRCLECDMELKLQGLDAMFFYGDVVSHMCKCGNSMTLLSADIPYTLHFGVRDDKFCAFYTPRKVFRAACAVDVNDCHSMAVVEGKQIDGKVVTKFIGDKFDFMVGYGMTFSMSPFELAQLYGSCITPNVCFVKGDVIKVVRLVNAEVIVNPANGRMAHGAGVAGAIAEKAGSAFIKETSDMVKAQGVCQVGECYESAGGKLCKKVLNIVGPDARGHGKQCYSLLERAYQHINKCDNVVTTLISAGIFSVPTDVSLTYLLGVVTKNVILVSNNQDDFDVIEKCQVTSVAGTKALSLQLAKNLCRDVKFVTNACSSLFSESCFVSSYDVLQEVEALRHDIQLDDDARVFVQANMDCLPTDWRLVNKFDSVDGVRTIKYFECPGGIFVSSQGKKFGYVQNGSFKEASVSQIRALLANKVDVLCTVDGVNFRSCCVAEGEVFGKTLGSVFCDGINVTKVRCSAIYKGKVFFQYSDLSEADLVAVKDAFGFDEPQLLKYYTMLGMCKWPVVVCGNYFAFKQSNNNCYINVACLMLQHLSLKFPKWQWQEAWNEFRSGKPLRFVSLVLAKGSFKFNEPSDSIDFMRVVLREADLSGATCNLEFVCKCGVKQEQRKGVDAVMHFGTLDKGDLVRGYNIACTCGSKLVHCTQFNVPFLICSNTPEGRKLPDDVVAANIFTGGSVGHYTHVKCKPKYQLYDACNVNKVSEAKGNFTDCLYLKNLKQTFSSVLTTFYLDDVKCVEYKPDLSQYYCESGKYYTKPIIKAQFRTFEKVDGVYTNFKLVGHSIAEKLNAKLGFDCNSPFVEYKITEWPTATGDVVLASDDLYVSRYLSGCITFGKPVVWLGHEEASLKSLTYFNRPSVVCENKFNVLPVDVSEPTDKGPVPAAVLVTGVPGADASAGAGIAKEQKACASASVEDQVVTEVRQEPSVSAADVKEVKLNGVKKPVKVEGSVVVNDPTSETKVVKSLSIVDVYDMFLTGCKYVVWTANELSRLVNSPTVREYVKWGMGKIVTPAKLLLLRDEKQEFVAPKVVKAKAIACYCAVKWFLLYCFSWIKFNTDNKVIYTTEVASKLTFKLCCLAFKNALQTFNWSVVSRGFFLVATVFLLWFNFLYANVILSDFYLPNIGPLPTFVGQIVAWFKTTFGVSTICDFYQVTDLGYRSSFCNGSMVCELCFSGFDMLDNYDAINVVQHVVDRRLSFDYISLFKLVVELVIGYSLYTVCFYPLFVLIGMQLLTTWLPEFFMLETMHWSARLFVFVANMLPAFTLLRFYIVVTAMYKVYCLCRHVMYGCSKPGCLFCYKRNRSVRVKCSTVVGGSLRYYDVMANGGTGFCTKHQWNCLNCNSWKPGNTFITHEAAADLSKELKRPVNPTDSAYYSVTEVKQVGCSMRLFYERDGQRVYDDVNASLFVDMNGLLHSKVKGVPETHVVVVENEADKAGFLGAAVFYAQSLYRPMLMVEKKLITTANTGLSVSRTMFDLYVDSLLNVLDVDRKSLTSFVNAAHNSLKEGVQLEQVMDTFIGCARRKCAIDSDVETKSITKSVMSAVNAGVDFTDESCNNLVPTYVKSDTIVAADLGVLIQNNAKHVQANVAKAANVACIWSVDAFNQLSADLQHRLRKACSKTGLKIKLTYNKQEANVPILTTPFSLKGGAVFSRMLQWLFVANLICFIVLWALMPTYAVHKSDMQLPLYASFKVIDNGVLRDVSVTDACFANKFNQFDQWYESTFGLAYYRNSKACPVVVAVIDQDIGHTLFNVPTTVLRYGFHVLHFITHAFATDSVQCYTPHMQIPYDNFYASGCVLSSLCTMLAHADGTPHPYCYTGGVMHNASLYSSLAPHVRYNLASSNGYIRFPEVVSEGIVRVVRTRSMTYCRVGLCEEAEEGICFNFNRSWVLNNPYYRAMPGTFCGRNAFDLIHQVLGGLVRPIDFFALTASSVAGAILAIIVVLAFYYLIKLKRAFGDYTSVVVINVIVWCINFLMLFVFQVYPTLSCLYACFYFYTTLYFPSEISVVMHLQWLVMYGAIMPLWFCIIYVAVVVSNHALWLFSYCRKIGTEVRSDGTFEEMALTTFMITKESYCKLKNSVSDVAFNRYLSLYNKYRYFSGKMDTAAYREAACSQLAKAMETFNHNNGNDVLYQPPTASVTTSFLQSGIVKMVSPTSKVEPCIVSVTYGNMTLNGLWLDDKVYCPRHVICSSADMTDPDYPNLLCRVTSSDFCVMSGRMSLTVMSYQMQGCQLVLTVTLQNPNTPKYSFGVVKPGETFTVLAAYNGRPQGAFHVTLRSSHTIKGSFLCGSCGSVGYVLTGDSVRFVYMHQLELSTGCHTGTDFSGNFYGPYRDAQVVQLPVQDYTQTVNVVAWLYAAIFNRCNWFVQSDSCSLEEFNVWAMTNGFSSIKADLVLDALASMTGVTVEQVLAAIKRLHSGFQGKQILGSCVLEDELTPSDVYQQLAGVKLQSKRTRVIKGTCCWILASTFLFCSIISAFVKWTMFMYVTTHMLGVTLCALCFVSFAMLLIKHKHLYLTMYIMPVLCTLFYTNYLVVYKQSFRGLAYAWLSHFVPAVDYTYMDEVLYGVVLLVAMVFVTMRSINHDVFSIMFLVGRLVSLVSMWYFGANLEEEVLLFLTSLFGTYTWTTMLSLATAKVIAKWLAVNVLYFTDVPQIKLVLLSYLCIGYVCCCYWGILSLLNSIFRMPLGVYNYKISVQELRYMNANGLRPPRNSFEALMLNFKLLGIGGVPVIEVSQIQSRLTDVKCANVVLLNCLQHLHIASNSKLWQYCSTLHNEILATSDLSVAFDKLAQLLVVLFANPAAVDSKCLASIEEVSDDYVRDNTVLQALQSEFVNMASFVEYELAKKNLDEAKASGSANQQQIKQLEKACNIAKSAYERDRAVARKLERMADLALTNMYKEARINDKKSKVVSALQTMLFSMVRKLDNQALNSILDNAVKGCVPLNAIPSLTSNTLTIIVPDKQVFDQVVDNVYVTYAGNVWHIQFIQDADGAVKQLNEIDVNSTWPLVIAANRHNEVSTVVLQNNELMPQKLRTQVVNSGSDMNCNTPTQCYYNTTGTGKIVYAILSDCDGLKYTKIVKEDGNCVVLELDPPCKFSVQDVKGLKIKYLYFVKGCNTLARGWVVGTLSSTVRLQAGTATEYASNSAILSLCAFSVDPKKTYLDYIKQGGVPVTNCVKMLCDHAGTGMAITIKPEATTNQDSYGGASVCIYCRSRVEHPDVDGLCKLRGKFVQVPLGIKDPVSYVLTHDVCQVCGFWRDGSCSCVGTGSQFQSKDTNFLNGFGVQV

SEQ ID NO: 32 - protein, 2714 aa, Artificial Sequence
  Synthetic_Replicative_Polyprotein1ab
RIRGTSVNARLVPCASGLDTDVQLRAFDICNANRAGIGLYYKVNCCRFQRVDEDGNKLDKFFVVKRTNLEVYNKEKECYELTKECGVVAEHEFFTFDVEGSRVPHIVRKDLSKFTMLDLCYALRHFDRNDCSTLKEILLTYAECEESYFQKKDWYDFVENPDIINVYKKLGPIFNRALLNTAKFADALVEAGLVGVLTLDNQDLYGQWYDFGDFVKTVPGCGVAVADSYYSYMMPMLTMCHALDSELFVNGTYREFDLVQYDFTDFKLELFTKYFKHWSMTYHPNTCECEDDRCIIHCANFNILFSMVLPKTCFGPLVRQIFVDGVPFVVSIGYHYKELGVVMNMDVDTHRYRLSLKDLLLYAADPALHVASASALLDLRTCCFSVAAITSGVKFQTVKPGNFNQDFYEFILSKGLLKEGSSVDLKHFFFTQDGNAAITDYNYYKYNLPTMVDIKQLLFVLEVVNKYFEIYEGGCIPATQVIVNNYDKSAGYPFNKFGKARLYYEALSFEEQDEIYAYTKRNVLPTLTQMNLKYAISAKNRARTVAGVSILSTMTGRMFHQKCLKSIAATRGVPVVIGTTKFYGGWDDMLRRLIKDVDSPVLMGWDYPKCDRAMPNILRIVSSLVLARKHDSCCSHTDRFYRLANECAQVLSEIVMCGGCYYVKPGGTSSGDATTAFANSVFNICQAVSANVCSLMACNGHKIEDLSIRELQKRLYSNVYRADHVDPAFVSEYYEFLNKHFSMMILSDDGVVCYNSEFASKGYIANISAFQQVLYYQNNVFMSEAKCWVETDIEKGPHEFCSQHTMLVKMDGDEVYLPYPDPSRILGAGCFVDDLLKTDSVLLIERFVSLAIDAYPLVYHENPEYQNVFRVYLEYIKKLYNDLGNQILDSYSVILSTCDGQKFTDETFYKNMYLRSAVLQSVGACVVCSSQTSLRCGSCIRKPLLCCKCAYDHVMSTDHKYVLSVSPYVCNSPGCDVNDVTKLYLGGMSYYCEDHKPQYSFKLVMNGMVFGLYKQSCTGSPYIEDFNKIASCKWTEVDDYVLANECTERLKLFAAETQKATEEAFKQCYASATIREIVSDRELILSWEIGKVRPPLNKNYVFTGYHFTNNGKTVLGEYVFDKSELTNGVYYRATTTYKLSVGDVFILTSHAVSSLSAPTLVPQENYTSIRFASVYSVPETFQNNVPNYQHIGMKRYCTVQGPPGTGKSHLAIGLAVYYCTARVVYTAASHAAVDALCEKAHKFLNINDCTRIVPAKVRVDCYDKFKVNDTTRKYVFTTINALPELVTDIIVVDEVSMLTNYELSVINSRVRAKHYVYIGDPAQLPAPRVLLNKGTLEPRYFNSVTKLMCCLGPDIFLGTCYRCPKEIVDTVSALVYNNKLKAKNDNSSMCFKVYYKGQTTHESSSAVNMQQIHLISKFLKANPSWSNAVFISPYNSQNYVAKRVLGLQTQTVDSAQGSEYDFVIYSQTAETAHSVNVNRFNVAITRAKKGILCVMSSMQLFESLNFTTLTLDKINNPRLQCTTNLFKDCSRSYVGYHPAHAPSFLAVDDKYKVGGDLAVCLNVADSAVTYSRLISLMGFKLDLTLDGYCKLFITRDEAIKRVRAWVGFDAEGAHAIRDSIGTNFPLQLGFSTGIDFVVEATGMFAERDGYVFKKAAARAPPGEQFKHLIPLMSRGQKWDVVRIRIVQMLSDHLVDLADSVVLVTWAASFELTCLRYFAKVGREVVCSVCTKRATCFNSRTGYYGCWRHSYSCDYLYNPLIVDIQQWGYTGSLTSNHDPICSVHKGAHVASSDAIMTRCLAVHDCFCKSVNWNLEYPIISNEVSVNTSCRLLQRVMFRAAMLCNRYDVCYDIGNPKGLACVKGYDFKFYDASPVVKSVKQFVYKYEAHKDQFLDGLCMFWNCNVDKYPANAVVCRFDTRVLNKLNLPGCNGGSLYVNKHAFHTSPFTRAAFENLKPMPFFYYSDTPCVYMEGMESKQVDYVPLRSATCITRCNLGGAVCLKHAEEYREYLESYNTATTAGFTFWVYKTFDFYNLWNTFTRLQSLENVVYNLVNAGHFDGRAGELPCAVIGEKVIAKIQNEDVVVFKNNTPFPTNVAVELFAKRSIRPHPELKLFRNLNIDVCWSHVLWDYAKDSVFCSSTYKVCKYTDLQCIESLNVLFDGRDNGALEAFKKCRNGVYINTTKIKSLSMIKGPQRADLNGVVVEKVGDSDVEFWFAVRKDGDDVIFSRTGSLEPSHYRSPQGNPGGNRVGDLSGNEALARGTIFTQSRLLSSFTPRSEMEKDFMDLDDDVFIAKYSLQDYAFEHVVYGSFNQKIIGGLHLLIGLARRQQKSNLVIQEFVTYDSSIHSYFITDENSGSSKSVCTVIDLLLDDFVDIVKSLNLKCVSKVVNVNVDFKDFQFMLWCNEEKVMTFYPRLQAAADWKPGYVMPVLYKYLESPLERVNLWNYGKPITLPTGCMMNVAKYTQLCQYLSTTTLAVPANMRVLHLGAGSDKGVAPGSAVLRQWLPAGSILVDNDVNPFVSDSVASYYGNCITLPFDCQWDLIISDMYDPLTKNIGEYNVSKDGFFTYLCHLIRDKLALGGSVAIKITEFSWNAELYSLMGKFAFWTIFCTNVNASSSEGFLIGINWLNKTRTEIDGKTMHANYLFWRNSTMWNGGAYSLFDMSKFPLKAAGTAVVSLKPDQINDLVLSLIEKGKLLVRDTRKEVFVGDSLVNVK

SEQ ID NO: 33 - DNA, 29844 bp, Artificial Sequence
  COVAX191_delta_N_RNA
gtataagagtgattggcgtccgtacgtaccctctcaactctaaaactcttgtagtttaaatctaatctaaactttataaacggcacttcctgcgtgtccatgcccgcgggcctggtcttgtcatagtgctgacatttgtagttccttgactttcgttctctgccagtgacgtgtccattcggcgccagcagcccacccataggttgcataatggcaaagatgggcaaatacggcctgggcttcaaatgggccccagaatttccatggatgcttccgaacgcatcggagaagttgggtaaccctgagaggtcagaggaggatgggttttgcccctctgctgcgcaagaaccgaaagttaaaggaaaaactttggttaatcacgtgagggtgaattgtagccggcttccagctttggaatgctgtgttcagtctgccataatccgtgatatttttgtagatgaggatccccagaaggtggaggcctcaactatgatggcattgcagttcggtagtgccgtcttggttaagccatccaagcgcttgtctattcaggcatggactaatttgggtgtgcttcccaaaacagctgccatggggttgttcaagcgcgtctgcctgtgtaacaccagggagtgctcttgtgacgcccacgtggcctttcacctttttacggtccaacccgatggtgtatgcctgggtaatggccgttttataggctggttcgttccagtcacagccataccggagtatgcgaagcagtggttgcaaccctggtccatccttcttcgtaagggtggtaacaaagggtctgtgacatccggccacttccgccgcgctgttaccatgcctgtgtatgactttaatgtagaggatgcttgtgaggaggttcatcttaacccgaagggtaagtactcctgcaaggcgtatgccctgctgaagggctatcgcggtgttaagcccatcctgtttgtggaccagtatggttgcgactatactggatgtctcgccaagggtcttgaggactatggcgatctcaccttgagtgagatgaaggagttgttccctgtgtggcgtgactccttggatagtgaagtccttgtggcttggcacgttgatcgagatcctcgggctgctatgcgtctgcagactcttgctactgtacgttgcattgattatgtgggccaaccgaccgaggatgtggtggatggagatgtggtagtgcgtgagcctgctcatcttctcgcagccaatgccattgttaaaagactcccccgtttggtggagactatgctgtatacggattcgtccgttacagaattctgttataaaaccaagctgtgtgaatgcggttttatcacgcagtttggctatgtggattgttgtggtgacacctgtgattttcgtgggtgggttgccggcaatatgatggatggctttccatgtccagggtgtaccaaaaattatatgccctgggaattggaggcccagtcatcaggtgttataccagaaggaggtgttctattcactcagagcactgatacagtgaatcgtgagtcctttaagctctacggtcatgctgttgtgccttttggttctgctgtgtattggagcccttgcccaggtatgtggcttccagtaatttggtcgtcggttaagtcatactctggtttgacttatacaggagtagttggttgtaaggcaattgttcaagagacagacgctatatgtcgttctctgtatatggattatgtccagcacaagtgtggcaatctcgagcagagagctatccttggattggacgatgtctatcatagacagttgcttgtgaataggggtgactatagtctcctccttgagaatgtggatttgtttgttaagcggcgcgctgaatttgcttgcaaattcgccacctgtggagatggtcttgtacccctcctactagatggtttagtgccccgcagttattatttgattaagagtggtcaagctttcacctctatgatggttaattttagccatgaggtgactgacatgtgtatggacatggctttattgttcatgcatgatgttaaagtggccactaagtatgttaagaaggttactggcaaactggccgtgcgctttaaagcgttgggtgtagccgttgtcagaaaaattactgaatggtttgatttagccgtggacattgctgctagtgccgctggatggctttgctaccagctggtaaatggcttatttgcagtggccaatggtgttataacctttgtacaggaggtgcctgagcttgtcaagaattttgttgacaagttcaaggcatttttcaaggttttgatcgactctatgtcggtttctatcttgtctggacttactgttgtcaagactgcctcaaatagggtgtgtcttgctggcagtaaggtttatgaagttgtgcagaaatctttgtctgcatatgttatgcctgtgggttgcagcgaagccacttgtttggtgggtgagattgaacctgcagtttttgaagatgatgttgttgatgtggttaaagccccattaacatatcaaggctgttgtaagccacccacttctttcgagaagatttgtattgtggataaattgtatatggccaagtgtggtgatcaattttaccctgtggttgttgataacgacactgttggcgtgttagatcagtgctggaggtttccctgtgcgggcaagaaagtcgagtttaacgacaagcccaaagtcaggaagataccctccacccgtaagattaagatcaccttcgcactggatgcgacctttgatagtgttctttcgaaggcgtgttcagagtttgaagttgataaagatgttacattggatgagctgcttgatgttgtgcttgacgcagttgagagtacgctcagcccttgtaaggagcatgatgtgataggcacaaaagtttgtgctttacttgataggttggcaggagattatgtctatctttttgatgagggaggcgatgaagtgatcgccccgaggatgtattgttccttttctgctcctgatgacgaggactgcgttgcagcggatgttgtagatgcagatgaaaaccaagatgatgatgccgaggactcagcagtccttgtcgctgatacccaagaagaggacggcgttgccaaggggcaggttgaggcggattcggaaatttgcgttgcgcatactggtagtcaagaagaattggctgagcctgatgctgtcggatctcaaactcccatcgcctctgctgaggaaaccgaagtcggagaggcaagcgacagggaagggattgctgaggcgaaggcaactgtgtgtgctgatgctgtagatgcctgccccgatcaagtggaggcatttgaaattgaaaaggtcgaggactctatcttggatgagcttcaaactgaacttaatgcgccagcggacaagacctatgaggatgtcttggcattcgatgccgtatgctcagaggcgttgtctgcattctatgctgtgccgagtgatgagacgcactttaaagtgtgtggattctattcgcctgctatagagcgcactaattgttggctgcgttctactttgatagtaatgcagagtctacctttggaatttaaagacttggagatgcaaaagctctggttgtcttacaaggccggctatgaccaatgctttgtggacaaactagttaagagcgtgcccaagtctattatccttccacaaggtggttatgtggcagattttgcctatttctttctaagccagtgtagctttaaagcttatgctaactggcgttgtttagagtgtgacatggagttaaagcttcaaggcttggacgccatgtttttctatggggacgttgtgtctcatatgtgcaagtgtggtaatagcatgaccttgttgtctgcagatataccctacactttgcattttggagtgcgagatgataagttttgcgctttttacacgccaagaaaggtctttagggctgcttgtgcggtagatgttaatgattgtcactctatggctgtagtagagggcaagcaaattgatggtaaagtggttaccaaatttattggtgacaaatttgattttatggtgggttacgggatgacatttagtatgtctccttttgaactcgcccagttatatggttcatgtataacaccaaatgtttgttttgttaaaggagatgttataaaggttgttcgcttagttaatgctgaagtcattgttaaccctgctaatgggcgtatggctcatggtgccggcgtcgccggcgccatagctgaaaaggcgggcagtgcttttattaaagaaacctccgatatggtgaaggctcagggcgtttgccaggttggtgaatgctatgaatctgccggtggtaagttatgtaaaaaggtgcttaacattgtagggccagatgcgcgagggcatggcaagcaatgctattcacttttagagcgtgcttatcagcatattaataagtgtgacaatgttgtcactactttaatttcggctggtatatttagtgtgcctactgatgtctccctaacttacttacttggtgtagtgacaaagaatgtcattcttgtcagtaacaaccaggatgattttgatgtgatagagaagtgtcaggtgacctccgttgctggtaccaaagcgctatcacttcaattggccaaaaatttgtgccgtgatgtaaagtttgtgacgaatgcatgtagttcgctttttagtgaatcttgctttgtctcaagctatgatgtgttgcaggaagttgaagcgctgcgacatgatatacaattggatgatgatgctcgtgtctttgtgcaggctaatatggactgtctgcccacagactggcgtctcgttaacaaatttgatagtgttgatggtgttagaaccattaagtattttgaatgcccgggcgggatttttgtatccagccagggcaaaaagtttggttatgttcagaatggttcatttaaggaggcgagtgttagccaaataagggctttactcgctaataaggttgatgtcttgtgtactgttgatggtgttaacttccgctcctgctgcgtagcagagggtgaagtttttggcaagacattaggttcagtcttttgtgatggcataaatgtcaccaaagttaggtgtagtgccatttacaagggtaaggttttctttcagtacagtgatttgtccgaggcagatcttgtggctgttaaagatgcctttggttttgatgaaccacaactgctgaagtactacactatgcttggcatgtgtaagtggccagtagttgtttgtggcaattattttgctttcaagcagtcaaataataattgctacatcaacgtggcatgtttaatgctgcaacacttgagtttaaagtttcctaagtggcaatggcaagaggcttggaacgagttccgctctggtaaaccactaaggtttgtgtccttggtattagcaaagggcagctttaaatttaatgaaccttctgattctatcgattttatgcgtgtggtgctacgtgaagcagatttgagtggtgccacgtgcaatttggaatttgtttgtaaatgtggtgtgaagcaagagcagcgcaaaggtgttgacgctgttatgcattttggtacgttggataaaggtgatcttgtcaggggttataatatcgcatgtacgtgcggtagtaaacttgtgcattgcacccaatttaacgtaccatttttaatttgctccaacacaccagagggtaggaaactgcccgacgatgttgttgcagctaatatttttactggtggtagtgtgggccattacacgcatgtgaaatgtaaacccaagtaccagctttatgatgcttgtaatgttaataaggtttcggaggctaagggtaattttaccgattgcctctaccttaaaaatttaaagcaaaccttctcgtctgtgctgacgactttttatttagatgacgtaaagtgtgtggagtataagccagatttatcgcagtattactgtgagtctggtaaatattatacaaaacccattattaaggcccaatttagaacatttgagaaggttgatggtgtctataccaactttaaattggtgggacatagtattgctgaaaaactcaatgctaagctgggatttgattgtaattctccctttgtggagtataaaattacagagtggccaacagctactggagatgtggtgttggctagtgatgatttgtatgtaagtcggtacttaagcgggtgcattacttttggtaaaccggttgtctggcttggccatgaggaagcatcgctgaaatctctcacatattttaatagacctagtgtcgtttgtgaaaataaatttaacgtgttgcccgttgatgtcagtgaacccacggacaaggggcctgtgcctgctgcagtccttgttaccggcgtccctggagctgatgcgtcagctggtgccggtattgccaaggagcaaaaagcctgtgcttctgctagtgtggaggatcaggttgttacggaggttcgtcaagagccatctgtttcagctgctgatgtcaaagaggttaaattgaatggtgttaaaaagcctgttaaggtggaaggtagtgtggttgttaatgatcccactagcgaaaccaaagttgttaaaagtttgtctattgttgatgtctatgatatgttcctgacagggtgtaagtatgtggtttggactgctaatgagttgtctcgactagtaaattcaccgactgttagggagtatgtgaagtggggtatgggaaagattgtaacacccgctaagttgttgttgttaagagatgagaagcaagagttcgtagcgccaaaagtagtcaaggcgaaagctattgcctgctattgtgctgtgaagtggtttctcctctattgttttagttggataaagtttaatactgacaataaggttatatacaccacagaagtagcttcaaagcttactttcaagttgtgctgtttggcctttaagaatgccttacagacgtttaattggagcgttgtgtctaggggctttttcctagttgcaacggtctttttactctggtttaactttttgtatgctaatgttattttgagtgacttctatttgcctaatattgggcctctccctacgtttgtgggacagatagttgcgtggtttaagactacatttggtgtgtcaaccatctgtgatttctaccaggtgacggatttgggctatagaagttcgttttgtaatggaagtatggtatgtgaactatgcttctcaggttttgatatgctggacaactatgatgctataaatgttgttcaacacgttgtagataggcgtttgtcctttgactatattagcctatttaaactggtagttgagcttgtaatcggctactctctttatactgtgtgcttctacccactgtttgtccttattggaatgcagttattgaccacatggttgcctgaattctttatgctggagactatgcattggagtgctcgtttgtttgtgtttgttgccaatatgcttccagcttttacgttactgcgattttacatcgtggtgacagctatgtataaggtctattgtctttgtagacatgttatgtatggatgtagtaagcctggttgcttgttttgttataagagaaaccgtagtgtccgtgttaagtgtagcaccgttgttggtggttcactacgctattacgatgtaatggctaacggcggcacaggtttctgtacaaagcaccagtggaactgtcttaattgcaattcctggaaaccaggcaatacattcataactcatgaagcagcggcggacctctctaaggagttgaaacgccctgtgaatccaacagattctgcttattactcggtcacagaggttaagcaggttggttgttccatgcgtttgttctacgagagagatggacagcgtgtttatgatgatgttaatgctagtttgtttgtggacatgaatggtctgctgcattctaaagttaaaggtgtgcctgaaacgcatgttgtggttgttgagaatgaagctgataaagctggttttctcggcgccgcagtgttttatgcacaatcgctctacagacctatgttgatggtggaaaagaaattaataactaccgccaacactggtttgtctgttagtcgaactatgtttgacctttatgtagattcattgctgaacgtcctcgacgtggatcgcaagagtctaacaagttttgtaaatgctgcgcacaactctctaaaggagggtgttcagcttgaacaagttatggatacctttattggctgtgcccgacgtaagtgtgctatagattctgatgttgaaaccaagtctattaccaagtccgtcatgtcggcagtaaatgctggcgttgattttacggatgagagttgtaataacttggtgcctacctatgttaaaagtgacactatcgttgcagccgatttgggtgttcttattcagaataatgctaagcatgtacaggctaatgttgctaaagccgctaatgtggcttgcatttggtctgtggatgcttttaaccagctatctgctgacttacagcataggctgcgaaaagcatgttcaaaaactggcttgaagattaagcttacttataataagcaggaggcaaatgttcctattttaactacaccgttctctcttaaagggggcgctgtttttagtagaatgttacaatggttgtttgttgctaatttgatttgtttcattgtgttgtgggcccttatgccaacatatgcagtgcacaaatcggatatgcagttgcctttatatgccagttttaaagttatagataacggtgtgctaagggatgtgtctgttactgacgcatgcttcgcaaacaaatttaatcaattcgaccaatggtatgagtctacttttggtcttgcttattaccgcaactctaaggcttgtcctgttgtggttgctgtaatagatcaagacattggccataccttatttaatgttcctaccacagttttaagatatggatttcatgtgttgcattttataacccatgcatttgctactgatagcgtgcagtgttacacgccacatatgcaaatcccctatgataatttctatgctagtggttgcgtgttgtcatccctctgtactatgcttgcgcatgcagatggaaccccgcatccttattgttatacagggggtgttatgcataatgcctctctgtatagttctttggctcctcatgtccgttataacctggctagttcaaatggttatatacgttttcccgaagtggttagtgaaggcattgtgcgtgttgtgcgcactcgctctatgacctactgcagggttggtttatgtgaggaggccgaggagggtatctgctttaattttaatcgttcatgggtattgaacaacccgtattatagggccatgcctggaactttttgtggtaggaatgcttttgatttaatacatcaagttttaggaggattagtgcggcctattgatttctttgccttaacggcgagttcagtggctggtgctatccttgcaattattgtcgttttggctttctattatttaatcaagcttaagcgtgcctttggtgactacactagtgttgtggttatcaatgtaattgtgtggtgtataaattttctgatgctttttgtgtttcaggtttatcccacattgtcttgtttatatgcttgtttctacttctacaccacgctttatttcccttcggagataagtgttgttatgcatttgcaatggcttgtcatgtatggtgctattatgcccttgtggttttgcattatttacgtggcagtcgttgtttcaaaccatgcattgtggttgttctcttactgccgcaaaattggtaccgaggttcgtagtgacggcacatttgaggaaatggcccttactacctttatgattactaaagaatcttattgtaagttgaaaaactctgtttctgatgttgcttttaacaggtacttgagtctttacaacaagtaccgttacttcagtggcaaaatggatactgccgcttatagagaggctgcctgttcacaactggcaaaggcaatggaaacatttaaccataataatggtaatgatgttctctatcagcctccaaccgcctctgttactacatcatttttacagtctggtatagtgaagatggtgtcgcccacctctaaagtggagccttgtattgttagtgttacttatggtaacatgacacttaatgggttgtggttggatgataaagtttattgcccaagacatgttatctgttcttcagctgacatgacagaccctgattatcctaatttgctttgtagagtgacatcaagtgatttttgtgttatgtctggtcgtatgagccttactgtaatgtcttatcaaatgcagggctgccaacttgttttgactgttacactgcaaaatcctaacacgcctaagtattccttcggtgttgttaagcctggtgagacatttactgtactggctgcatacaatggcagacctcaaggagccttccatgttacgcttcgtagtagccataccataaagggctcctttctatgtggatcctgcggttctgtaggatatgttttaactggcgatagtgtacgatttgtttatatgcatcagctagagttgagtactggttgtcataccggtactgactttagtgggaacttttatggtccctatagagatgcgcaagttgtacaattgcctgttcaggattatacgcagactgttaatgttgtagcttggctttatgctgctatttttaacagatgcaactggtttgtgcaaagtgatagttgttccctggaggagtttaatgtttgggctatgaccaatggttttagctcaatcaaagccgatcttgtcttggatgcgcttgcttctatgacaggcgttacagttgaacaggtgttggccgctattaagaggctgcattctggattccagggcaaacaaattttaggtagttgtgtgcttgaagatgagctgacaccaagtgatgtttatcaacaactagctggtgtcaagctacagtcaaagcgcacaagagttataaaaggtacatgttgctggatattggcttcaacgtttttgttctgtagcattatctcagcatttgtaaaatggactatgtttatgtatgttactacccatatgttgggagtgacattgtgtgcactttgttttgtaagctttgctatgttgttgatcaagcataagcatttgtatttaactatgtacatcatgcctgtgttatgcacactgttttacaccaactatttggttgtgtacaaacagagttttagaggtctagcttatgcttggctttcacactttgtccctgctgtagattatacatatatggatgaagttttatatggtgttgtgttgctagtagctatggtgtttgttaccatgcgtagcataaaccacgacgtcttttctattatgttcttggttggtagacttgtcagcctggtatccatgtggtattttggagccaatttagaggaagaggtactattgttcctcacatccctatttggcacgtacacatggactactatgttgtcattggctaccgctaaggttattgctaaatggttggctgtgaatgtcttgtacttcacagacgtaccgcaaattaaattagttctgttgagctacttgtgtattggttatgtgtgttgttgttattggggaatcttgtcactccttaatagcatttttaggatgccattgggcgtctacaattataaaatctccgttcaggagttacgttatatgaatgctaatggcttgcgcccacctagaaatagttttgaggccctgatgcttaattttaagctgttgggaattggtggtgtgccagtcattgaagtatctcaaattcaatcaagattgacggatgttaaatgtgctaatgttgtgttgcttaattgcctccagcacttgcatattgcatctaattctaagttgtggcagtattgtagtactttgcacaatgaaatactggctacatctgatttgagcgtggccttcgataagttggctcaactcttagttgttttatttgctaatccagcagcagtggatagcaagtgccttgcaagtattgaagaagtgagcgatgattacgttcgcgacaatactgtcttgcaagccttacagagtgaatttgttaatatggctagcttcgttgagtatgaacttgctaagaagaatctagatgaggctaaggctagcggctctgccaatcaacagcagattaagcagctagagaaggcgtgtaatattgctaagtcagcatatgagcgcgacagagctgttgctcgtaagctggaacgtatggctgatttagctcttacaaacatgtataaagaagctagaattaatgataagaagagtaaggtagtgtctgcattgcaaaccatgctctttagtatggtgcgtaagctagataaccaagctcttaattctattttagacaacgcagttaagggttgtgtacctttgaatgcaataccatcattgacttcgaacactctgactataatagtgccagataagcaggtttttgatcaggttgtggataatgtgtatgtcacctatgctgggaatgtatggcatatacagtttattcaagatgctgatggtgctgttaaacaattgaatgagatagatgttaattcaacctggcctctagtcattgctgcaaataggcataatgaagtgtctactgttgttttgcagaacaatgagttgatgcctcagaagttgagaactcaggttgtcaatagtggctcagatatgaattgtaatactcctacccagtgttactataatactactggcacgggtaagattgtgtatgctatacttagtgactgtgacggcctgaagtacactaagatagtaaaagaagatggaaattgtgttgttttggaattggatcctccctgtaagttttctgttcaggatgtgaagggccttaaaattaagtacctttactttgtgaaggggtgtaatacactggctagaggctgggttgtaggcaccttatcctcgacagtgagattgcaggcgggtacggcaactgagtatgcctccaactctgcaatactgtcgctgtgtgcgttttctgtagatcctaagaaaacgtacttggattatataaaacagggtggagttcccgttactaattgtgttaagatgttatgtgaccatgctggcactggtatggccattactattaagccggaggcaaccactaatcaggattcttatggtggtgcttccgtttgtatatattgccgctcgcgtgttgaacatccagatgttgatggattgtgcaaattacgcggcaagtttgtccaagtgcccttaggcataaaagatcctgtgtcatatgtgttgacgcatgatgtttgtcaggtttgtggcttttggcgagatggtagctgttcctgtgtaggcacaggctcccagtttcagtcaaaagacacgaactttttaaacggattcggggtacaagtgtaaatgcccgtcttgtaccctgtgccagtggcttggacactgatgttcaattaagggcatttgacatttgtaatgctaatcgagctggcattggtttgtattataaagtgaattgctgccgcttccagcgtgtagatgaggacggcaacaagttggataagttctttgttgttaaaagaactaatttagaagtgtataacaaggagaaagaatgctatgagttgacaaaagaatgcggtgttgtggctgaacacgagttcttcacatttgatgtggagggaagtcgggtaccacacatagtccgtaaagatctttcaaagtttactatgttagatctttgctatgcattgcgtcattttgaccgcaatgattgttcaactcttaaggaaattctccttacatatgctgagtgtgaagagtcctacttccaaaagaaggactggtatgattttgttgagaatcctgatataattaatgtgtacaagaagcttggtcctatatttaatagagccctgcttaacactgccaagtttgcagacgcattagtggaggcaggcttagtaggtgttttaacacttgataatcaagatttatatggtcaatggtatgactttggagattttgtcaagacagtacctggttgtggtgttgccgtggcagactcttattattcatatatgatgccaatgctgactatgtgtcatgcgttggatagtgagttgtttgttaatggtacttatagggagtttgaccttgttcagtatgattttactgatttcaagctagagctgttcactaagtattttaagcattggagtatgacctaccacccgaacacctgtgagtgcgaggatgacaggtgcattattcattgcgccaattttaatatacttttcagcatggtcttacctaagacctgttttgggcctcttgttaggcagatatttgtggatggtgttcctttcgttgtgtcgatcggttaccattataaagaattaggtgttgttatgaatatggatgtggatacacatcgttatcgcttgtctcttaaggacttgcttttgtatgctgcagaccctgcccttcatgtggcgtctgctagtgcactgcttgatttgcgcacatgttgttttagcgttgcagctattacaagtggcgtaaaatttcaaacagttaaacctggaaattttaatcaggatttctacgagtttattttgagtaaaggcctgcttaaagaggggagctccgttgatttgaagcacttcttctttacgcaggatggtaatgctgctattactgattacaattactacaagtataatctacccaccatggtggatattaagcagttgttgtttgttttagaagttgttaataagtacttcgagatctatgagggtgggtgtatacccgcaacacaggtcattgttaataattatgacaagagtgctggctatccatttaataaatttggaaaggccaggctctattatgaggcattatcatttgaggagcaggatgaaatttatgcgtataccaaacgcaatgtcctgccgaccctaactcaaatgaatcttaaatatgctattagtgctaagaatagggcccgcaccgttgctggtgtctctattctcagtactatgactggcagaatgtttcatcaaaagtgtctaaagagtatagcagctactcgcggtgttcctgtagttataggcaccacgaagttctatggcggttgggatgatatgttacgccgccttattaaagatgttgatagtcctgtactcatgggttgggactatcctaaatgtgatcgtgctatgccaaacatactgcgtattgttagtagtttggtgctagcccgtaaacatgattcgtgctgttcgcatacggatagattctatcgtcttgcgaacgagtgcgcccaagttttgagtgaaattgttatgtgtggtggttgttattatgttaaaccaggtggcactagtagtggggatgcaaccactgcttttgctaattctgtgtttaacatttgtcaagctgtttccgccaatgtatgctcgcttatggcatgcaatggacacaaaattgaagatttgagtatacgcgagttacaaaagcgcctatactctaatgtctatcgtgcggaccatgttgaccccgcatttgttagtgagtattatgagtttttaaacaagcattttagtatgatgattttgagtgatgatggtgttgtgtgttataattcagagtttgcgtccaagggttatattgctaatataagtgcctttcaacaggtattatattatcaaaacaacgtgtttatgtctgaggccaaatgttgggtagaaacagacatcgaaaagggaccgcatgaattttgttctcaacatacaatgctagtcaagatggatggtgatgaagtctaccttccataccctgatccttcgagaatcttaggagcaggctgttttgttgatgatttactcaagactgatagcgttctcttgatagagcgtttcgtaagtcttgcaattgatgcttatcctttagtataccatgagaacccagagtatcaaaatgtgttccgggtatatttagaatacatcaagaagctgtacaatgatctcggtaatcagatcctggacagctacagtgttattttaagtacttgtgatggtcaaaagtttactgacgagacgttttacaagaacatgtatttaagaagtgcagtgctgcaaagcgttggtgcctgcgttgtctgtagttctcaaacatcattacgttgtggcagttgcatacgcaagcctttgctgtgttgcaaatgcgcctatgatcatgttatgtccactgatcataaatatgtcctgagtgtgtcaccatatgtgtgtaattcaccgggatgtgatgtaaatgatgttaccaaattgtatttaggtggtatgtcatattattgtgaggaccataaaccacagtattcattcaaattggtgatgaatggtatggtttttggtttatataagcagtcttgtactggttcgccctacatagaggattttaataaaatcgctagttgcaaatggacagaagtcgatgattatgtgctagctaatgaatgcaccgaacgccttaaattgtttgccgcagaaacgcagaaggccacagaagaggcctttaagcaatgttatgcgtcagcaacgatccgtgagatcgtgagcgatcgggagttaattttatcttgggaaattggtaaagtccgcccgccacttaataaaaattacgtgttcaccggctaccattttactaataatggtaagacagttttaggtgagtatgtttttgataagagtgagttgactaatggtgtgtattatcgcgccacaaccacttataagttatctgtaggtgatgtgttcattttaacatcacacgcagtgtctagtttaagtgctcctacattagtaccgcaggagaattatactagcattcgttttgctagtgtttatagtgtgcctgagacgtttcagaataatgtgcctaattatcagcacattggaatgaagcgctattgtactgtacagggaccgcctggtactggtaagtcccatctagccattgggctagctgtttattattgtacagcgcgcgtggtgtataccgctgctagccatgctgcagttgacgcgctgtgtgaaaaggcacataaatttctcaacatcaacgactgcacgcgtattgttcctgcaaaggtgcgtgtagattgttatgataaattcaaggtcaatgacaccactcgcaagtatgtgtttactacaataaatgcattacctgagttggtgactgacattattgtcgttgatgaagttagtatgcttaccaactatgagctgtctgttattaacagtcgtgttagggctaagcattatgtgtatattggcgacccggcgcagttacctgcaccacgtgtgctactgaataagggaactctagaacctagatattttaattccgttaccaagctaatgtgttgtttgggtccagatattttcttgggcacctgttatagatgccctaaggagattgtggatacggtgtcagccttggtttataataataagctgaaggctaaaaatgataatagctccatgtgctttaaggtttattataagggccagactacacatgagagttctagtgctgttaatatgcagcaaatacatttaatttccaagtttctgaaggcaaaccccagttggagtaacgccgtatttattagtccttataactcgcagaactatgttgctaagagagtcttgggattacaaacccagacagtagactcagcgcagggttctgaatatgattttgttatctactcacagactgcggaaacagcgcattctgtcaatgtaaatagattcaatgttgctattacacgtgctaagaagggtattctctgtgtcatgagtagtatgcaattatttgagtctcttaattttactacactgacgttggataagattaacaatccacgattacagtgtactacaaatttgtttaaggattgtagcaggagctatgtaggatatcacccagcccatgcaccatcctttttggcagttgatgacaaatataaggtaggcggtgatttagccgtttgccttaatgttgctgattctgctgtcacttattcgcggcttatatcactcatgggattcaagcttgacttgacccttgatggttattgtaagctgtttataactagagatgaagctatcaaacgtgttagagcctgggttggcttcgatgcagaaggtgcccatgcgatacgtgatagcattgggacaaatttcccattacaattaggcttttcgactggaattgattttgttgtcgaagccactggaatgtttgctgagagagatggttatgtctttaaaaaggcagccgcacgagctcctcctggcgaacaatttaaacaccttatcccacttatgtcaagagggcagaaatgggatgtggttcgcattagaatagtacaaatgttgtcagaccacctagtggatttggcagacagtgttgtacttgtgacgtgggctgccagctttgagctcacatgtttgcgatatttcgctaaagttggaagagaagttgtgtgtagtgtctgcaccaagcgtgcgacatgttttaattctagaactggatactatggatgctggcgacatagttattcctgtgattacctgtacaacccactaatagttgacattcaacagtggggatatacaggatctttaactagcaatcatgatcctatttgcagcgtgcataagggtgctcatgttgcatcatctgatgctatcatgacccggtgtctagctgttcatgattgcttttgtaagtctgttaattggaatttagaataccccattatttcaaatgaggtcagtgttaatacctcctgcaggttattgcagcgcgtaatgtttagggctgcgatgctatgcaataggtatgatgtgtgttatgacattggcaaccctaaaggtcttgcctgtgtcaaaggatatgattttaagttctatgacgcctcccctgttgttaagtctgttaaacagtttgtttacaaatacgaggcacataaagatcaatttttagatggtttgtgtatgttttggaactgcaatgtggataagtatccagcgaatgcagttgtgtgtaggtttgacacgcgtgtgttgaacaaattaaatctccctggctgtaatggtggcagtttgtatgttaacaaacatgcattccacaccagtccctttacccgggctgccttcgagaatttgaagcctatgcctttcttttattattcagatacgccctgtgtgtatatggaaggcatggaatctaagcaggtcgattatgtcccattgagaagcgctacatgcatcacaagatgcaatttaggtggcgctgtttgtttaaaacatgctgaggagtatcgtgagtaccttgagtcttacaatacggcaaccacagcgggttttactttttgggtctataagacttttgatttttacaacctttggaatacttttactaggctccaaagtttagaaaatgtagtgtataacctggtcaacgctggacactttgatggccgggcgggtgaactgccttgtgctgttataggtgagaaagtcattgccaagattcaaaatgaggatgtcgtggtctttaaaaataacacgccattccccactaatgtggctgtcgaattatttgctaagcgcagtattcggccccaccccgagcttaagctctttagaaatttgaatattgacgtgtgctggagtcacgtcctttgggattatgctaaggatagtgtgttttgcagttcgacgtataaggtctgcaaatacacagatttacagtgcattgaaagcttgaatgtactttttgatggtcgtgataatggtgctcttgaagcttttaagaagtgccggaatggcgtctacattaacacgacaaaaattaaaagtctgtcgatgattaaaggcccacaacgtgccgatttgaatggcgtagttgtggagaaagttggagattctgatgtggaattttggtttgctgtgcgtaaagacggtgacgatgttatcttcagccgtacagggagccttgaaccgagccattaccggagcccacaaggtaatccgggtggtaatcgcgtgggtgatctcagcggtaatgaagctctagcgcgtggcactatctttactcaaagcagattattatcttctttcacacctcgatcagagatggagaaagattttatggatttagatgatgatgtgttcattgcaaaatatagtttacaggactacgcgtttgaacacgttgtttatggtagttttaaccagaagattattggaggtttgcatttgcttattggcttagcccgtaggcagcaaaaatccaatctggtaattcaagagttcgtgacatacgactctagcattcattcgtactttatcactgacgagaacagtggtagtagtaagagtgtgtgcactgttattgatttattgttagatgattttgtggacattgtaaagtccctgaatctaaagtgtgtgagtaaggttgttaatgttaatgtggattttaaggacttccagtttatgttgtggtgcaatgaggagaaggtcatgactttctatcctcgtttgcaggctgctgctgactggaaacctggttatgttatgcctgtcttatataagtatttggaatcgcctctggaaagagtaaacctctggaattatggcaagccgattactttacctacaggatgtatgatgaatgttgctaagtatactcaattatgtcaatatttgagcactacaacattagcagttccggctaatatgcgtgtcttacaccttggtgccggttcggataagggtgttgcccctgggtctgcagttcttaggcagtggctaccagcgggaagtattcttgtagataatgatgtgaatccatttgtgagtgacagtgtcgcctcatattatggaaattgtataaccttaccctttgattgtcagtgggatctgataatttctgatatgtacgaccctcttactaagaacattggggagtacaacgtgagtaaagatggattctttacttacctctgtcatttaattcgtgacaagttggctctgggtggcagtgttgccataaaaataacagagttttcttggaacgctgagttatatagtttaatggggaagtttgcgttctggacaatcttttgcaccaacgtaaacgcctcttcaagtgaaggatttttgattggcataaattggttgaataagacccgtaccgaaattgacggtaaaaccatgcatgccaattatctgttttggagaaatagtacaatgtggaatggaggggcttacagtctctttgacatgagtaagttccctttgaaagcggctggtacggctgttgttagccttaaaccagaccaaataaatgacttagtcctctccttgattgagaagggcaagttattagtgcgtgatacacgcaaagaagtttttgttggcgatagcctagtaaatgtcaaataaatctatacttgtcgtggctgtgaaaatggcctttgctgacaagcctaatcatttcataaactttcccctggcccaatttagtggctttatgggtaagtatttaaagctacagtctcaacttgtggaaatgggtttagactgtaaattacagaaggcaccacatgttagtattaccctgcttgatattaaagcagaccaatacaaacaggtggaatttgcaatacaagaaataatagatgatctggcggcatatgagggagatattgtctttgacaaccctcacatgcttggcagatgccttgttcttgatgttagaggatttgaagagttgcatgaagatattgttgaaattctccgcagaaggggttgcacggcagatcaatccagacactggattccgcactgcactgtggcccaatttgacgaagaaagagaaacaaaaggaatgcaattctatcataaagaacccttctacctcaagcataacaacctattaacggatgctgggcttgagctcgtgaagataggttcttccaaaatagatgggttttattgtagtgaactgagtgtttggtgtggtgagaggctttgttataagcctccaacacccaaattcagtgatatatttggctattgctgcatagataaaatacgtggtgatttagaaataggcgacctgccgcaggatgatgaggaagcgtgggccgagctaagttaccactatcaaagaaacacctacttcttcagacatgtgcacgataatagcatctattttcgtaccgtgtgtagaatgaagggttgtatgtgttgatttgtttttacactattagtgtaataagcttattattttgttgaaaagggcaggatgtgcatagctatggctcctcgcacactgcttttgctgatttgatgtcagctggtgtttgggttcaatgaacctcttaacatcgtttcacatttaaatgatgactggtttctatttggtgacagtcggtccgactgtacctatgtagaaaataacggtcatcctaaattagattggcttgacctcgacccaaagttgtgtaattcaggaaagatttccgcaaagagtggtaactctctctttaggagttttcacttcactgatttttacaattatacgggtgagggataccaaattgtattttatgaaggagttaattttagtcccagccatggctttaaatgcctggctcatggagataataaaagatggatgggcaataaagctcgattttatgcccgagtgtatgagaagatggcccaatataggagcctatcgtttgttaatgtgtcttatgcctatggaggtaatgcaaagcccgcctccatttgcaaagacaatactttaacactcaataaccccaccttcatatcgaaggagtctaattatgttgattactactacgagagtgaggctaatttcacactagaaggttgtgatgaatttatagtaccgctctgtggttttaatggccattccaagggctcgtcgtcggatgctgccaataaatattatactgactctcagagttactataatatggatattggtgtcttatatgggttcaattcgaccttggatgttggcaacactgctaaggatccgggtcttgatctcacttgtaggtatcttgcattgactcctggtaattataaggctgtgtccttagaatatttgttaagcttaccctcaaaggctatttgcctccataagacaaagcgctttatgcctgtgcaggtagttgactcaaggtggagtagcatccgccagtcagacaatatgaccgctgcagcctgtcagctgccatattgtttctttcgcaacacatctgcgaattatagtggtggcacacatgatgcgcaccatggtgattttcatttcaggcagttattgtctggtttgttatataatgtttcctgtattgcccagcagggtgcatttctttataataatgtgtcgtcctcttggccagcctatgggtacggtcattgtccaacggcagctaacattggttatatggcacctgtttgtatctatgaccctctcccggtcatactgctaggtgtgttattgggtatagctgtgttgactattgtgtttctgatgttttattttatgacggatagcggtgttagattgcatgaggcataatctaaacatgtttgtttttcttgttttattgccactagtctctagtcagtgtgttaatcttacaaccagaactcaattaccccctgcatacactaattctttcacacgtggtgtttattaccctgacaaagttttcagatcctcagttttacattcaactcaggacttgttcttacctttcttttccaatgttacttggttccatgctatacatgtctctgggaccaatggtactaagaggtttgataaccctgtcctaccatttaatgatggtgtttactttgcttccactgagaagtctaacataataagaggctggatttttggtactactttagattcgaaaacccagtccctacttattgttaataacgctactaatgttgttatcaaagtctgtgaatttcaattttgtaacgatccatttttgggtgtttattaccacaaaaacaacaaaagttggatggaaagtgagttcagagtttattctagtgcgaataattgcacttttgaatacgtctctcagccttttcttatggaccttgaaggaaaacagggtaatttcaaaaatcttagggaatttgtgttcaagaatattgatggttacttcaagatatactctaagcacacgcctattaatttagtgcgtgatctccctcagggtttttcggctttagaaccattggtagatttgccaataggtattaacatcactaggtttcaaactttacttgctttacatagaagttatttaactcctggtgattcttcttcaggttggacagctggtgctgcagcttattatgtgggttatcttcaacctaggacttttctactgaagtacaatgaaaatggaaccattacagatgctgtagactgtgcacttgaccctctctcagaaacaaagtgtacgttgaaatccttcactgtagaaaaaggaatctatcaaacttctaactttagagtccaaccaacagaatctattgttagatttcctaacatcacaaacttgtgcccttttggtgaagtttttaacgccaccagatttgcatctgtttatgcttggaacaggaagagaatcagcaactgtgttgctgattattctgtcctgtataattccgcatcattttccacttttaagtgttatggagtgtctcctactaaattaaatgatctctgctttactaatgtctatgcagattcatttgtaattagaggtgatgaagtcagacaaatcgctccagggcaaactggaaagattgctgattataactacaaattaccagatgattttacaggctgcgttatagcttggaattctaacaatcttgattctaaggttggtggtaattataattacctgtacagattgtttaggaagtctaatctcaaaccttttgagagagatatttcaactgaaatctatcaggccggtagcacaccttgtaatggtgttgaaggttttaattgttactttcctctgcaatcatatggtttccaacccactaatggtgttggttaccaaccatacagagtagtagtactttcttttgaacttctacatgcaccagcaactgtttgtggacctaaaaagtctactaatttggttaagaacaagtgtgtcaatttcaacttcaatggtttaacaggcacaggtgttcttactgagtctaacaaaaagtttctgcctttccaacaatttggcagagacattgctgacactactgatgctgttcgtgatccacaaacacttgagattcttgacattacaccatgttcttttggtggtgtcagtgttataacaccaggaacaaatacttctaaccaggttgctgttctttatcaggatgttaactgcacagaagtccctgttgctattcatgcagatcaacttactcctacttggcgtgtttattctacaggttctaatgtttttcaaacacgtgcaggctgtttaataggggctgaacatgtcaacaactcatatgagtgtgacatacccattggtgcaggtatatgcgctagttatcagactcagactaattctcctcggagagcaagaagtgtagctagtcaatccatcattgcctacactatgtcacttggtgcagaaaattcagttgcttactctaataactctattgccatacccacaaattttactattagcgttaccacagaaattctaccagtgtctatgaccaagacatcagtagattgtacaatgtacatttgtggtgattcaactgaatgcagcaatcttttgttgcaatatggcagtttttgtacacaattaaaccgtgctttaactggaatagctgttgaacaagacaaaaacacccaagaagtttttgcacaagtcaaacaaatttacaagacaccaccaattaaagattttggcggttttaattttagccagatactgccagatccatcaaaaccaagcaagaggtcatttattgaagatctactgttcaacaaagtgacacttgcagatgctggcttcatcaaacaatatggtgattgccttggtgatattgctgctagagacctcatttgtgcacaaaagtttaacggccttactgttttgccacctttgctcacagatgaaatgattgctcaatacacttctgcactgttagcaggtacaatcacttctggttggacttttggtgcaggtgctgcattacaaataccatttgctatgcaaatggcttataggtttaatggtattggagttacacagaatgttctctatgagaaccaaaaattgattgccaaccaatttaatagtgctattggcaaaattcaagactcactttcttccacagcaagtgcacttggaaaacttcaagatgtggtcaaccaaaatgcacaagctttaaacacgcttgttaaacaacttagctccaattttggtgcaatttcaagtgttttaaacgacatcctttcacgtcttgacaaagttgaggctgaagtgcaaattgataggttgatcacaggcagacttcaaagtttgcagacatatgtgactcaacaattaattagagctgcagaaatcagagcttctgctaatcttgctgctactaaaatgtcagagtgtgtacttggacaatcaaaaagagttgacttttgcggaaagggctatcatcttatgtcatttcctcagtcagcacctcatggtgtcgtctttttgcatgtgacttatgtccctgcacaagaaaagaacttcacaactgctcctgccatttgtcatgatggaaaagcacactttcctcgtgaaggtgtctttgtttcaaatggcacacactggtttgtaacacaaaggaatttttatgaaccacaaatcattactacagacaacacatttgtgtctggtaactgtgatgttgtaataggaattgtcaacaacacagtttatgatcctttgcaacctgaattagactcattcaaggaggagcttgataaatacttcaagaaccatacctcaccagatgttgatttaggtgacatctctggcattaatgcttcagttgtaaacattcagaaagaaatcgaccgcctcaatgaggttgccaagaatttaaatgaatctctcatcgatctccaagaacttggaaagtatgagcagtatataaaatggccatggtacatttggctaggttttatagctggcttgattgccatagtaatggtgacaattatgctttgctgtatgaccagttgctgtagttgtctcaagggctgttgttcttgtggatcctgctgcaaatttgacgaggacgactctgagccagtgctcaaaggagtcaaattacattacacataactatcacagcctctcctggaaagacagaaaatctaaacaatttatagcattctcattgctacctggccccgtaagaggcagtcatagctatggccgtgttggtcctaaggctacattggctgctgtctttattggtccatttattgtagcatgtatgctaggcattggcctagtttatttattgcaattgcaagttcaaatttttcatgttaaggataccatacgtgtgactggcaagccagccactgtgtcttatactacaagtacaccagtaacaccgagcgcgacgacgctcgatggtactacgtatactttaattagacccactagctcttatacaagagtttatcttggtactccaagaggttttgattatagtacatttgggcctaagaccctagattatgttactaatctaaacctcatcttaattctggtcgtccatatacttttaaggcattgtccaggcatatgaggccaacagccacatggatttggcatgtgagtgatgcatggttacgccgcacgcgggactttggtgtcattcgcctagaagatttttgttttcaatttaattatagccaaccccgagttggttattgtagagttcctttaaaggcttggtgtagcaaccagggtaaatttgcagcgcagtttaccctaaaaagttgcgaaaaaccaggtcacgaaaaatttattactagcttcacggcctacggcagaactgtccaacaggccgttagcaagttagtagaagaagctgttgattttattctttttagggccacgcagctcgaaagaaatgtttaatttattccttacagacacagtatggtatgtggggcagattatttttatattcgcagtgtgtttgatggtcaccataattgtggttgccttccttgcgtctatcaaactttgtattcaactttgcggtttatgtaatactttggtgctgtccccttctatttatttgtatgataggagtaagcagctttataagtactataatgaagaaatgagactgcccctattagaggtggatgatatctaatccaaacattatgagtagtactactcaggccccagagcccgtctatcaatggaccgccgacgaggcagttcaattccttaaggaatggaacttctcgttgggcattatactactctttattactatcatactacagttcggttacacgagccgtagcatgtttatttatgttgtgaaaatgataatcttgtggttaatgtggccactgactattgttttgtgtattttcaattgcgtgtatgcgctaaataatgtgtatcttggattttctatagtgtttactatagtgtccattgtaatctggatcatgtattttgtgaacagcataaggttgtttatcaggactggtagctggtggagcttcaaccccgaaacaaacaaccttatgtgtatagatatgaaaggtaccgtgtatgttagacccattattgaggattaccatacactaacagccactattattcgtggccacctctacatgcaaggtgttaagctaggcaccggtttctctttgtctgacttgcccgcttatgttacagttgctaaggtgtcacacctttgcacttataagcgcgcattcttagacaaggtagacggtgttagcggttttgctgtttatgtgaagtccaaggtcggaaattaccgactgccctcaaacaaaccgagtggcgcggacaccgcattgttgagaacctaatctaaactttaaggagagaatgaatcctatgtcggcgctcggtggtaacccctcgcgagaaagtcgggataggacactctctatcagaatggatgtcttgctgtcataacagatagagaaggttgtggcagaccctgtatcaattagttgaaagagattgcaaaatagagaatgtgtgagagaagttagcaaggtcctacgtctaaccataagaacggcgataggcgccccctgggaacagctcacatcagggtactattcctgcaatgccctagtaaatgaatgaagttgatcatggccaattggaagaatcacaaaaaaaaaaaaaaaaacggccggttt

SEQ ID NO: 34 - DNA, 27671 bp, Artificial Sequence
  COVAX191_delta_HEN_RNA
gtataagagtgattggcgtccgtacgtaccctctcaactctaaaactcttgtagtttaaatctaatctaaactttataaacggcacttcctgcgtgtccatgcccgcgggcctggtcttgtcatagtgctgacatttgtagttccttgactttcgttctctgccagtgacgtgtccattcggcgccagcagcccacccataggttgcataatggcaaagatgggcaaatacggcctgggcttcaaatgggccccagaatttccatggatgcttccgaacgcatcggagaagttgggtaaccctgagaggtcagaggaggatgggttttgcccctctgctgcgcaagaaccgaaagttaaaggaaaaactttggttaatcacgtgagggtgaattgtagccggcttccagctttggaatgctgtgttcagtctgccataatccgtgatatttttgtagatgaggatccccagaaggtggaggcctcaactatgatggcattgcagttcggtagtgccgtcttggttaagccatccaagcgcttgtctattcaggcatggactaatttgggtgtgcttcccaaaacagctgccatggggttgttcaagcgcgtctgcctgtgtaacaccagggagtgctcttgtgacgcccacgtggcctttcacctttttacggtccaacccgatggtgtatgcctgggtaatggccgttttataggctggttcgttccagtcacagccataccggagtatgcgaagcagtggttgcaaccctggtccatccttcttcgtaagggtggtaacaaagggtctgtgacatccggccacttccgccgcgctgttaccatgcctgtgtatgactttaatgtagaggatgcttgtgaggaggttcatcttaacccgaagggtaagtactcctgcaaggcgtatgccctgctgaagggctatcgcggtgttaagcccatcctgtttgtggaccagtatggttgcgactatactggatgtctcgccaagggtcttgaggactatggcgatctcaccttgagtgagatgaaggagttgttccctgtgtggcgtgactccttggatagtgaagtccttgtggcttggcacgttgatcgagatcctcgggctgctatgcgtctgcagactcttgctactgtacgttgcattgattatgtgggccaaccgaccgaggatgtggtggatggagatgtggtagtgcgtgagcctgctcatcttctcgcagccaatgccattgttaaaagactcccccgtttggtggagactatgctgtatacggattcgtccgttacagaattctgttataaaaccaagctgtgtgaatgcggttttatcacgcagtttggctatgtggattgttgtggtgacacctgtgattttcgtgggtgggttgccggcaatatgatggatggctttccatgtccagggtgtaccaaaaattatatgccctgggaattggaggcccagtcatcaggtgttataccagaaggaggtgttctattcactcagagcactgatacagtgaatcgtgagtcctttaagctctacggtcatgctgttgtgccttttggttctgctgtgtattggagcccttgcccaggtatgtggcttccagtaatttggtcgtcggttaagtcatactctggtttgacttatacaggagtagttggttgtaaggcaattgttcaagagacagacgctatatgtcgttctctgtatatggattatgtccagcacaagtgtggcaatctcgagcagagagctatccttggattggacgatgtctatcatagacagttgcttgtgaataggggtgactatagtctcctccttgagaatgtggatttgtttgttaagcggcgcgctgaatttgcttgcaaattcgccacctgtggagatggtcttgtacccctcctactagatggtttagtgccccgcagttattatttgattaagagtggtcaagctttcacctctatgatggttaattttagccatgaggtgactgacatgtgtatggacatggctttattgttcatgcatgatgttaaagtggccactaagtatgttaagaaggttactggcaaactggccgtgcgctttaaagcgttgggtgtagccgttgtcagaaaaattactgaatggtttgatttagccgtggacattgctgctagtgccgctggatggctttgctaccagctggtaaatggcttatttgcagtggccaatggtgttataacctttgtacaggaggtgcctgagcttgtcaagaattttgttgacaagttcaaggcatttttcaaggttttgatcgactctatgtcggtttctatcttgtctggacttactgttgtcaagactgcctcaaatagggtgtgtcttgctggcagtaaggtttatgaagttgtgcagaaatctttgtctgcatatgttatgcctgtgggttgcagcgaagccacttgtttggtgggtgagattgaacctgcagtttttgaagatgatgttgttgatgtggttaaagccccattaacatatcaaggctgttgtaagccacccacttctttcgagaagatttgtattgtggataaattgtatatggccaagtgtggtgatcaattttaccctgtggttgttgataacgacactgttggcgtgttagatcagtgctggaggtttccctgtgcgggcaagaaagtcgagtttaacgacaagcccaaagtcaggaagataccctccacccgtaagattaagatcaccttcgcactggatgcgacctttgatagtgttctttcgaaggcgtgttcagagtttgaagttgataaagatgttacattggatgagctgcttgatgttgtgcttgacgcagttgagagtacgctcagcccttgtaaggagcatgatgtgataggcacaaaagtttgtgctttacttgataggttggcaggagattatgtctatctttttgatgagggaggcgatgaagtgatcgccccgaggatgtattgttccttttctgctcctgatgacgaggactgcgttgcagcggatgttgtagatgcagatgaaaaccaagatgatgatgccgaggactcagcagtccttgtcgctgatacccaagaagaggacggcgttgccaaggggcaggttgaggcggattcggaaatttgcgttgcgcatactggtagtcaagaagaattggctgagcctgatgctgtcggatctcaaactcccatcgcctctgctgaggaaaccgaagtcggagaggcaagcgacagggaagggattgctgaggcgaaggcaactgtgtgtgctgatgctgtagatgcctgccccgatcaagtggaggcatttgaaattgaaaaggtcgaggactctatcttggatgagcttcaaactgaacttaatgcgccagcggacaagacctatgaggatgtcttggcattcgatgccgtatgctcagaggcgttgtctgcattctatgctgtgccgagtgatgagacgcactttaaagtgtgtggattctattcgcctgctatagagcgcactaattgttggctgcgttctactttgatagtaatgcagagtctacctttggaatttaaagacttggagatgcaaaagctctggttgtcttacaaggccggctatgaccaatgctttgtggacaaactagttaagagcgtgcccaagtctattatccttccacaaggtggttatgtggcagattttgcctatttctttctaagccagtgtagctttaaagcttatgctaactggcgttgtttagagtgtgacatggagttaaagcttcaaggcttggacgccatgtttttctatggggacgttgtgtctcatatgtgcaagtgtggtaatagcatgaccttgttgtctgcagatataccctacactttgcattttggagtgcgagatgataagttttgcgctttttacacgccaagaaaggtctttagggctgcttgtgcggtagatgttaatgattgtcactctatggctgtagtagagggcaagcaaattgatggtaaagtggttaccaaatttattggtgacaaatttgattttatggtgggttacgggatgacatttagtatgtctccttttgaactcgcccagttatatggttcatgtataacaccaaatgtttgttttgttaaaggagatgttataaaggttgttcgcttagttaatgctgaagtcattgttaaccctgctaatgggcgtatggctcatggtgccggcgtcgccggcgccatagctgaaaaggcgggcagtgcttttattaaagaaacctccgatatggtgaaggctcagggcgtttgccaggttggtgaatgctatgaatctgccggtggtaagttatgtaaaaaggtgcttaacattgtagggccagatgcgcgagggcatggcaagcaatgctattcacttttagagcgtgcttatcagcatattaataagtgtgacaatgttgtcactactttaatttcggctggtatatttagtgtgcctactgatgtctccctaacttacttacttggtgtagtgacaaagaatgtcattcttgtcagtaacaaccaggatgattttgatgtgatagagaagtgtcaggtgacctccgttgctggtaccaaagcgctatcacttcaattggccaaaaatttgtgccgtgatgtaaagtttgtgacgaatgcatgtagttcgctttttagtgaatcttgctttgtctcaagctatgatgtgttgcaggaagttgaagcgctgcgacatgatatacaattggatgatgatgctcgtgtctttgtgcaggctaatatggactgtctgcccacagactggcgtctcgttaacaaatttgatagtgttgatggtgttagaaccattaagtattttgaatgcccgggcgggatttttgtatccagccagggcaaaaagtttggttatgttcagaatggttcatttaaggaggcgagtgttagccaaataagggctttactcgctaataaggttgatgtcttgtgtactgttgatggtgttaacttccgctcctgctgcgtagcagagggtgaagtttttggcaagacattaggttcagtcttttgtgatggcataaatgtcaccaaagttaggtgtagtgccatttacaagggtaaggttttctttcagtacagtgatttgtccgaggcagatcttgtggctgttaaagatgcctttggttttgatgaaccacaactgctgaagtactacactatgcttggcatgtgtaagtggccagtagttgtttgtggcaattattttgctttcaagcagtcaaataataattgctacatcaacgtggcatgtttaatgctgcaacacttgagtttaaagtttcctaagtggcaatggcaagaggcttggaacgagttccgctctggtaaaccactaaggtttgtgtccttggtattagcaaagggcagctttaaatttaatgaaccttctgattctatcgattttatgcgtgtggtgctacgtgaagcagatttgagtggtgccacgtgcaatttggaatttgtttgtaaatgtggtgtgaagcaagagcagcgcaaaggtgttgacgctgttatgcattttggtacgttggataaaggtgatcttgtcaggggttataatatcgcatgtacgtgcggtagtaaacttgtgcattgcacccaatttaacgtaccatttttaatttgctccaacacaccagagggtaggaaactgcccgacgatgttgttgcagctaatatttttactggtggtagtgtgggccattacacgcatgtgaaatgtaaacccaagtaccagctttatgatgcttgtaatgttaataaggtttcggaggctaagggtaattttaccgattgcctctaccttaaaaatttaaagcaaaccttctcgtctgtgctgacgactttttatttagatgacgtaaagtgtgtggagtataagccagatttatcgcagtattactgtgagtctggtaaatattatacaaaacccattattaaggcccaatttagaacatttgagaaggttgatggtgtctataccaactttaaattggtgggacatagtattgctgaaaaactcaatgctaagctgggatttgattgtaattctccctttgtggagtacaaaattacagagtggccaacagctactggagatgtggtgttggctagtgatgatttgtatgtaagtcggtacttaagcgggtgcattacttttggtaaaccggttgtctggcttggccatgaggaagcatcgctgaaatctctcacatattttaatagacctagtgtcgtttgtgaaaataaatttaacgtgttgcccgttgatgtcagtgaacccacggacaaggggcctgtgcctgctgcagtccttgttaccggcgtccctggagctgatgcgtcagctggtgccggtattgccaaggagcaaaaagcctgtgcttctgctagtgtggaggatcaggttgttacggaggttcgtcaagagccatctgtttcagctgctgatgtcaaagaggttaaattgaatggtgttaaaaagcctgttaaggtggaaggtagtgtggttgttaatgatcccactagcgaaaccaaagttgttaaaagtttgtctattgttgatgtctatgatatgttcctgacagggtgtaagtatgtggtttggactgctaatgagttgtctcgactagtaaattcaccgactgttagggagtatgtgaagtggggtatgggaaagattgtaacacccgctaagttgttgttgttaagagatgagaagcaagagttcgtagcgccaaaagtagtcaaggcgaaagctattgcctgctattgtgctgtgaagtggtttctcctctattgttttagttggataaagtttaatactgacaataaggttatatacaccacagaagtagcttcaaagcttactttcaagttgtgctgtttggcctttaagaatgccttacagacgtttaattggagcgttgtgtctaggggctttttcctagttgcaacggtctttttactctggtttaactttttgtatgctaatgttattttgagtgacttctatttgcctaatattgggcctctccctacgtttgtgggacagatagttgcgtggtttaagactacatttggtgtgtcaaccatctgtgatttctaccaggtgacggatttgggctatagaagttcgttttgtaatggaagtatggtatgtgaactatgcttctcaggttttgatatgctggacaactatgatgctataaatgttgttcaacacgttgtagataggcgtttgtcctttgactatattagcctatttaaactggtagttgagcttgtaatcggctactctctttatactgtgtgcttctacccactgtttgtccttattggaatgcagttattgaccacatggttgcctgaattctttatgctggagactatgcattggagtgctcgtttgtttgtgtttgttgccaatatgcttccagcttttacgttactgcgattttacatcgtggtgacagctatgtataaggtctattgtctttgtagacatgttatgtatggatgtagtaagcctggttgcttgttttgttataagagaaaccgtagtgtccgtgttaagtgtagcaccgttgttggtggttcactacgctattacgatgtaatggctaacggcggcacaggtttctgtacaaagcaccagtggaactgtcttaattgcaattcctggaaaccaggcaatacattcataactcatgaagcagcggcggacctctctaaggagttgaaacgccctgtgaatccaacagattctgcttattactcggtcacagaggttaagcaggttggttgttccatgcgtttgttctacgagagagatggacagcgtgtttatgatgatgttaatgctagtttgtttgtggacatgaatggtctgctgcattctaaagttaaaggtgtgcctgaaacgcatgttgtggttgttgagaatgaagctgataaagctggttttctcggcgccgcagtgttttatgcacaatcgctctacagacctatgttgatggtggaaaagaaattaataactaccgccaacactggtttgtctgttagtcgaactatgtttgacctttatgtagattcattgctgaacgtcctcgacgtggatcgcaagagtctaacaagttttgtaaatgctgcgcacaactctctaaaggagggtgttcagcttgaacaagttatggatacctttattggctgtgcccgacgtaagtgtgctatagattctgatgttgaaaccaagtctattaccaagtccgtcatgtcggcagtaaatgctggcgttgattttacggatgagagttgtaataacttggtgcctacctatgttaaaagtgacactatcgttgcagccgatttgggtgttcttattcagaataatgctaagcatgtacaggctaatgttgctaaagccgctaatgtggcttgcatttggtctgtggatgcttttaaccagctatctgctgacttacagcataggctgcgaaaagcatgttcaaaaactggcttgaagattaagcttacttataataagcaggaggcaaatgttcctattttaactacaccgttctctcttaaagggggcgctgtttttagtagaatgttacaatggttgtttgttgctaatttgatttgtttcattgtgttgtgggcccttatgccaacatatgcagtgcacaaatcggatatgcagttgcctttatatgccagttttaaagttatagataacggtgtgctaagggatgtgtctgttactgacgcatgcttcgcaaacaaatttaatcaattcgaccaatggtatgagtctacttttggtcttgcttattaccgcaactctaaggcttgtcctgttgtggttgctgtaatagatcaagacattggccataccttatttaatgttcctaccacagttttaagatatggatttcatgtgttgcattttataacccatgcatttgctactgatagcgtgcagtgttacacgccacatatgcaaatcccctatgataatttctatgctagtggttgcgtgttgtcatccctctgtactatgcttgcgcatgcagatggaaccccgcatccttattgttatacagggggtgttatgcataatgcctctctgtatagttctttggctcctcatgtccgttataacctggctagttcaaatggttatatacgttttcccgaagtggttagtgaaggcattgtgcgtgttgtgcgcactcgctctatgacctactgcagggttggtttatgtgaggaggccgaggagggtatctgctttaattttaatcgttcatgggtattgaacaacccgtattatagggccatgcctggaactttttgtggtaggaatgcttttgatttaatacatcaagttttaggaggattagtgcggcctattgatttctttgccttaacggcgagttcagtggctggtgctatccttgcaattattgtcgttttggctttctattatttaatcaagcttaagcgtgcctttggtgactacactagtgttgtggttatcaatgtaattgtgtggtgtataaattttctgatgctttttgtgtttcaggtttatcccacattgtcttgtttatatgcttgtttctacttctacaccacgctttatttcccttcggagataagtgttgttatgcatttgcaatggcttgtcatgtatggtgctattatgcccttgtggttttgcattatttacgtggcagtcgttgtttcaaaccatgcattgtggttgttctcttactgccgcaaaattggtaccgaggttcgtagtgacggcacatttgaggaaatggcccttactacctttatgattactaaagaatcttattgtaagttgaaaaactctgtttctgatgttgcttttaacaggtacttgagtctttacaacaagtaccgttacttcagtggcaaaatggatactgccgcttatagagaggctgcctgttcacaactggcaaaggcaatggaaacatttaaccataataatggtaatgatgttctctatcagcctccaaccgcctctgttactacatcatttttacagtctggtatagtgaagatggtgtcgcccacctctaaagtggagccttgtattgttagtgttacttatggtaacatgacacttaatgggttgtggttggatgataaagtttattgcccaagacatgttatctgttcttcagctgacatgacagaccctgattatcctaatttgctttgtagagtgacatcaagtgatttttgtgttatgtctggtcgtatgagccttactgtaatgtcttatcaaatgcagggctgccaacttgttttgactgttacactgcaaaatcctaacacgcctaagtattccttcggtgttgttaagcctggtgagacatttactgtactggctgcatacaatggcagacctcaaggagccttccatgttacgcttcgtagtagccataccataaagggctcctttctatgtggatcctgcggttctgtaggatatgttttaactggcgatagtgtacgatttgtttatatgcatcagctagagttgagtactggttgtcataccggtactgactttagtgggaacttttatggtccctatagagatgcgcaagttgtacaattgcctgttcaggattatacgcagactgttaatgttgtagcttggctttatgctgctatttttaacagatgcaactggtttgtgcaaagtgatagttgttccctggaggagtttaatgtttgggctatgaccaatggttttagctcaatcaaagccgatcttgtcttggatgcgcttgcttctatgacaggcgttacagttgaacaggtgttggccgctattaagaggctgcattctggattccagggcaaacaaattttaggtagttgtgtgcttgaagatgagctgacaccaagtgatgtttatcaacaactagctggtgtcaagctacagtcaaagcgcacaagagttataaaaggtacatgttgctggatattggcttcaacgtttttgttctgtagcattatctcagcatttgtaaaatggactatgtttatgtatgttactacccatatgttgggagtgacattgtgtgcactttgttttgtaagctttgctatgttgttgatcaagcataagcatttgtatttaactatgtacatcatgcctgtgttatgcacactgttttacaccaactatttggttgtgtacaaacagagttttagaggtctagcttatgcttggctttcacactttgtccctgctgtagattatacatatatggatgaagttttatatggtgttgtgttgctagtagctatggtgtttgttaccatgcgtagcataaaccacgacgtcttttctattatgttcttggttggtagacttgtcagcctggtatccatgtggtattttggagccaatttagaggaagaggtactattgttcctcacatccctatttggcacgtacacatggactactatgttgtcattggctaccgctaaggttattgctaaatggttggctgtgaatgtcttgtacttcacagacgtaccgcaaattaaattagttctgttgagctacttgtgtattggttatgtgtgttgttgttattggggaatcttgtcactccttaatagcatttttaggatgccattgggcgtctacaattataaaatctccgttcaggagttacgttatatgaatgctaatggcttgcgcccacctagaaatagttttgaggccctgatgcttaattttaagctgttgggaattggtggtgtgccagtcattgaagtatctcaaattcaatcaagattgacggatgttaaatgtgctaatgttgtgttgcttaattgcctccagcacttgcatattgcatctaattctaagttgtggcagtattgtagtactttgcacaatgaaatactggctacatctgatttgagcgtggccttcgataagttggctcaactcttagttgttttatttgctaatccagcagcagtggatagcaagtgccttgcaagtattgaagaagtgagcgatgattacgttcgcgacaatactgtcttgcaagccttacagagtgaatttgttaatatggctagcttcgttgagtatgaacttgctaagaagaatctagatgaggctaaggctagcggctctgccaatcaacagcagattaagcagctagagaaggcgtgtaatattgctaagtcagcatatgagcgcgacagagctgttgctcgtaagctggaacgtatggctgatttagctcttacaaacatgtataaagaagctagaattaatgataagaagagtaaggtagtgtctgcattgcaaaccatgctctttagtatggtgcgtaagctagataaccaagctcttaattctattttagacaacgcagttaagggttgtgtacctttgaatgcaataccatcattgacttcgaacactctgactataatagtgccagataagcaggtttttgatcaggttgtggataatgtgtatgtcacctatgctgggaatgtatggcatatacagtttattcaagatgctgatggtgctgttaaacaattgaatgagatagatgttaattcaacctggcctctagtcattgctgcaaataggcataatgaagtgtctactgttgttttgcagaacaatgagttgatgcctcagaagttgagaactcaggttgtcaatagtggctcagatatgaattgtaatactcctacccagtgttactataatactactggcacgggtaagattgtgtatgctatacttagtgactgtgacggcctgaagtacactaagatagtaaaagaagatggaaattgtgttgttttggaattggatcctccctgtaagttttctgttcaggatgtgaagggccttaaaattaagtacctttactttgtgaaggggtgtaatacactggctagaggctgggttgtaggcaccttatcctcgacagtgagattgcaggcgggtacggcaactgagtatgcctccaactctgcaatactgtcgctgtgtgcgttttctgtagatcctaagaaaacgtacttggattatataaaacagggtggagttcccgttactaattgtgttaagatgttatgtgaccatgctggcactggtatggccattactattaagccggaggcaaccactaatcaggattcttatggtggtgcttccgtttgtatatattgccgctcgcgtgttgaacatccagatgttgatggattgtgcaaattacgcggcaagtttgtccaagtgcccttaggcataaaagatcctgtgtcatatgtgttgacgcatgatgtttgtcaggtttgtggcttttggcgagatggtagctgttcctgtgtaggcacaggctcccagtttcagtcaaaagacacgaactttttaaacggattcggggtacaagtgtaaatgcccgtcttgtaccctgtgccagtggcttggacactgatgttcaattaagggcatttgacatttgtaatgctaatcgagctggcattggtttgtattataaagtgaattgctgccgcttccagcgtgtagatgaggacggcaacaagttggataagttctttgttgttaaaagaactaatttagaagtgtataacaaggagaaagaatgctatgagttgacaaaagaatgcggtgttgtggctgaacacgagttcttcacatttgatgtggagggaagtcgggtaccacacatagtccgtaaagatctttcaaagtttactatgttagatctttgctatgcattgcgtcattttgaccgcaatgattgttcaactcttaaggaaattctccttacatatgctgagtgtgaagagtcctacttccaaaagaaggactggtatgattttgttgagaatcctgatataattaatgtgtacaagaagcttggtcctatatttaatagagccctgcttaacactgccaagtttgcagacgcattagtggaggcaggcttagtaggtgttttaacacttgataatcaagatttatatggtcaatggtatgactttggagattttgtcaagacagtacctggttgtggtgttgccgtggcagactcttattattcatatatgatgccaatgctgactatgtgtcatgcgttggatagtgagttgtttgttaatggtacttatagggagtttgaccttgttcagtatgattttactgatttcaagctagagctgttcactaagtattttaagcattggagtatgacctaccacccgaacacctgtgagtgcgaggatgacaggtgcattattcattgcgccaattttaatatacttttcagcatggtcttacctaagacctgttttgggcctcttgttaggcagatatttgtggatggtgttcctttcgttgtgtcgatcggttaccattataaagaattaggtgttgttatgaatatggatgtggatacacatcgttatcgcttgtctcttaaggacttgcttttgtatgctgcagaccctgcccttcatgtggcgtctgctagtgcactgcttgatttgcgcacatgttgttttagcgttgcagctattacaagtggcgtaaaatttcaaacagttaaacctggaaattttaatcaggatttctacgagtttattttgagtaaaggcctgcttaaagaggggagctccgttgatttgaagcacttcttctttacgcaggatggtaatgctgctattactgattacaattactacaagtataatctacccaccatggtggatattaagcagttgttgtttgttttagaagttgttaataagtacttcgagatctatgagggtgggtgtatacccgcaacacaggtcattgttaataattatgacaagagtgctggctatccatttaataaatttggaaaggccaggctctattatgaggcattatcatttgaggagcaggatgaaatttatgcgtataccaaacgcaatgtcctgccgaccctaactcaaatgaatcttaaatatgctattagtgctaagaatagggcccgcaccgttgctggtgtctctattctcagtactatgactggcagaatgtttcatcaaaagtgtctaaagagtatagcagctactcgcggtgttcctgtagttataggcaccacgaagttctatggcggttgggatgatatgttacgccgccttattaaagatgttgatagtcctgtactcatgggttgggactatcctaaatgtgatcgtgctatgccaaacatactgcgtattgttagtagtttggtgctagcccgtaaacatgattcgtgctgttcgcatacggatagattctatcgtcttgcgaacgagtgcgcccaagttttgagtgaaattgttatgtgtggtggttgttattatgttaaaccaggtggcactagtagtggggatgcaaccactgcttttgctaattctgtgtttaacatttgtcaagctgtttccgccaatgtatgctcgcttatggcatgcaatggacacaaaattgaagatttgagtatacgcgagttacaaaagcgcctatactctaatgtctatcgtgcggaccatgttgaccccgcatttgttagtgagtattatgagtttttaaacaagcattttagtatgatgattttgagtgatgatggtgttgtgtgttataattcagagtttgcgtccaagggttatattgctaatataagtgcctttcaacaggtattatattatcaaaacaacgtgtttatgtctgaggccaaatgttgggtagaaacagacatcgaaaagggaccgcatgaattttgttctcaacatacaatgctagtcaagatggatggtgatgaagtctaccttccataccctgatccttcgagaatcttaggagcaggctgttttgttgatgatttactcaagactgatagcgttctcttgatagagcgtttcgtaagtcttgcaattgatgcttatcctttagtataccatgagaacccagagtatcaaaatgtgttccgggtatatttagaatacatcaagaagctgtacaatgatctcggtaatcagatcctggacagctacagtgttattttaagtacttgtgatggtcaaaagtttactgacgagacgttttacaagaacatgtatttaagaagtgcagtgctgcaaagcgttggtgcctgcgttgtctgtagttctcaaacatcattacgttgtggcagttgcatacgcaagcctttgctgtgttgcaaatgcgcctatgatcatgttatgtccactgatcataaatatgtcctgagtgtgtcaccatatgtgtgtaattcaccgggatgtgatgtaaatgatgttaccaaattgtatttaggtggtatgtcatattattgtgaggaccataaaccacagtattcattcaaattggtgatgaatggtatggtttttggtttatataagcagtcttgtactggttcgccctacatagaggattttaataaaatcgctagttgcaaatggacagaagtcgatgattatgtgctagctaatgaatgcaccgaacgccttaaattgtttgccgcagaaacgcagaaggccacagaagaggcctttaagcaatgttatgcgtcagcaacgatccgtgagatcgtgagcgatcgggagttaattttatcttgggaaattggtaaagtccgcccgccacttaataaaaattacgtgttcaccggctaccattttactaataatggtaagacagttttaggtgagtatgtttttgataagagtgagttgactaatggtgtgtattatcgcgccacaaccacttataagttatctgtaggtgatgtgttcattttaacatcacacgcagtgtctagtttaagtgctcctacattagtaccgcaggagaattatactagcattcgttttgctagtgtttatagtgtgcctgagacgtttcagaataatgtgcctaattatcagcacattggaatgaagcgctattgtactgtacagggaccgcctggtactggtaagtcccatctagccattgggctagctgtttattattgtacagcgcgcgtggtgtataccgctgctagccatgctgcagttgacgcgctgtgtgaaaaggcacataaatttctcaacatcaacgactgcacgcgtattgttcctgcaaaggtgcgtgtagattgttatgataaattcaaggtcaatgacaccactcgcaagtatgtgtttactacaataaatgcattacctgagttggtgactgacattattgtcgttgatgaagttagtatgcttaccaactatgagctgtctgttattaacagtcgtgttagggctaagcattatgtgtatattggcgacccggcgcagttacctgcaccacgtgtgctactgaataagggaactctagaacctagatattttaattccgttaccaagctaatgtgttgtttgggtccagatattttcttgggcacctgttatagatgccctaaggagattgtggatacggtgtcagccttggtttataataataagctgaaggctaaaaatgataatagctccatgtgctttaaggtttattataagggccagactacacatgagagttctagtgctgttaatatgcagcaaatacatttaatttccaagtttctgaaggcaaaccccagttggagtaacgccgtatttattagtccttataactcgcagaactatgttgctaagagagtcttgggattacaaacccagacagtagactcagcgcagggttctgaatatgattttgttatctactcacagactgcggaaacagcgcattctgtcaatgtaaatagattcaatgttgctattacacgtgctaagaagggtattctctgtgtcatgagtagtatgcaattatttgagtctcttaattttactacactgacgttggataagattaacaatccacgattacagtgtactacaaatttgtttaaggattgtagcaggagctatgtaggatatcacccagcccatgcaccatcctttttggcagttgatgacaaatataaggtaggcggtgatttagccgtttgccttaatgttgctgattctgctgtcacttattcgcggcttatatcactcatgggattcaagcttgacttgacccttgatggttattgtaagctgtttataactagagatgaagctatcaaacgtgttagagcctgggttggcttcgatgcagaaggtgcccatgcgatacgtgatagcattgggacaaatttcccattacaattaggcttttcgactggaattgattttgttgtcgaagccactggaatgtttgctgagagagatggttatgtctttaaaaaggcagccgcacgagctcctcctggcgaacaatttaaacaccttatcccacttatgtcaagagggcagaaatgggatgtggttcgcattagaatagtacaaatgttgtcagaccacctagtggatttggcagacagtgttgtacttgtgacgtgggctgccagctttgagctcacatgtttgcgatatttcgctaaagttggaagagaagttgtgtgtagtgtctgcaccaagcgtgcgacatgttttaattctagaactggatactatggatgctggcgacatagttattcctgtgattacctgtacaacccactaatagttgacattcaacagtggggatatacaggatctttaactagcaatcatgatcctatttgcagcgtgcataagggtgctcatgttgcatcatctgatgctatcatgacccggtgtctagctgttcatgattgcttttgtaagtctgttaattggaatttagaataccccattatttcaaatgaggtcagtgttaatacctcctgcaggttattgcagcgcgtaatgtttagggctgcgatgctatgcaataggtatgatgtgtgttatgacattggcaaccctaaaggtcttgcctgtgtcaaaggatatgattttaagttctatgacgcctcccctgttgttaagtcggtcaaacagtttgtttacaaatacgaggcacataaagatcaatttttagatggtttgtgtatgttttggaactgcaatgtggataagtatccagcgaatgcagttgtgtgtaggtttgacacgcgtgtgttgaacaaattaaatctccctggctgtaatggtggcagtttgtatgttaacaaacatgcattccacaccagtccctttacccgggctgccttcgagaatttgaagcctatgcctttcttttattattcagatacgccctgtgtgtatatggaaggcatggaatctaagcaggtcgattatgtcccattgagaagcgctacatgcatcacaagatgcaatttaggtggcgctgtttgtttaaaacatgctgaggagtatcgtgagtaccttgagtcttacaatacggcaaccacagcgggttttactttttgggtctataagacttttgatttttacaacctttggaatacttttactaggctccaaagtttagaaaatgtagtgtataacctggtcaacgctggacactttgatggccgggcgggtgaactgccttgtgctgttataggtgagaaagtcattgccaagattcaaaatgaggatgtcgtggtctttaaaaataacacgccattccccactaatgtggctgtcgaattatttgctaagcgcagtattcggccccaccccgagcttaagctctttagaaatttgaatattgacgtgtgctggagtcacgtcctttgggattatgctaaggatagtgtgttttgcagttcgacgtataaggtctgcaaatacacagatttacagtgcattgaaagcttgaatgtactttttgatggtcgtgataatggtgctcttgaagcttttaagaagtgccggaatggcgtctacattaacacgacaaaaattaaaagtctgtcgatgattaaaggcccacaacgtgccgatttgaatggcgtagttgtggagaaagttggagattctgatgtggaattttggtttgctgtgcgtaaagacggtgacgatgttatcttcagccgtacagggagccttgaaccgagccattaccggagcccacaaggtaatccgggtggtaatcgcgtgggtgatctcagcggtaatgaagctctagcgcgtggcactatctttactcaaagcagattattatcttctttcacacctcgatcagagatggagaaagattttatggatttagatgatgatgtgttcattgcaaaatatagtttacaggactacgcgtttgaacacgttgtttatggtagttttaaccagaagattattggaggtttgcatttgcttattggcttagcccgtaggcagcaaaaatccaatctggtaattcaagagttcgtgacatacgactctagcattcattcgtactttatcactgacgagaacagtggtagtagtaagagtgtgtgcactgttattgatttattgttagatgattttgtggacattgtaaagtccctgaatctaaagtgtgtgagtaaggttgttaatgttaatgtggattttaaggacttccagtttatgttgtggtgcaatgaggagaaggtcatgactttctatcctcgtttgcaggctgctgctgactggaaacctggttatgttatgcctgtcttatataagtatttggaatcgcctctggaaagagtaaacctctggaattatggcaagccgattactttacctacaggatgtatgatgaatgttgctaagtatactcaattatgtcaatatttgagcactacaacattagcagttccggctaatatgcgtgtcttacaccttggtgccggttcggataagggtgttgcccctgggtctgcagttcttaggcagtggctaccagcgggaagtattcttgtagataatgatgtgaatccatttgtgagtgacagtgtcgcctcatattatggaaattgtataaccttaccctttgattgtcagtgggatctgataatttctgatatgtacgaccctcttactaagaacattggggagtacaacgtgagtaaagatggattctttacttacctctgtcatttaattcgtgacaagttggctctgggtggcagtgttgccataaaaataacagagttttcttggaacgctgagttatatagtttaatggggaagtttgcgttctggacaatcttttgcaccaacgtaaacgcctcttcaagtgaaggatttttgattggcataaattggttgaataagacccgtaccgaaattgacggtaaaaccatgcatgccaattatctgttttggagaaatagtacaatgtggaatggaggggcttacagtctctttgacatgagtaagttccctttgaaagcggctggtacggctgttgttagccttaaaccagaccaaataaatgacttagtcctctccttgattgagaagggcaagttattagtgcgtgatacacgcaaagaagtttttgttggcgatagcctagtaaatgtcaaataaacgaacaatgtttgtttttcttgttttattgccactagtctctagtcagtgtgttaatcttacaaccagaactcaattaccccctgcatacactaattctttcacacgtggtgtttattaccctgacaaagttttcagatcctcagttttacattcaactcaggacttgttcttacctttcttttccaatgttacttggttccatgctatacatgtctctgggaccaatggtactaagaggtttgataaccctgtcctaccatttaatgatggtgtttactttgcttccactgagaagtctaacataataagaggctggatttttggtactactttagattcgaaaacccagtccctacttattgttaataacgctactaatgttgttatcaaagtctgtgaatttcaattttgtaacgatccatttttgggtgtttattaccacaaaaacaacaaaagttggatggaaagtgagttcagagtttattctagtgcgaataattgcacttttgaatacgtctctcagccttttcttatggaccttgaaggaaaacagggtaatttcaaaaatcttagggaatttgtgttcaagaatattgatggttacttcaagatatactctaagcacacgcctattaatttagtgcgtgatctccctcagggtttttcggctttagaaccattggtagatttgccaataggtattaacatcactaggtttcaaactttacttgctttacatagaagttatttaactcctggtgattcttcttcaggttggacagctggtgctgcagcttattatgtgggttatcttcaacctaggacttttctactgaagtacaatgaaaatggaaccattacagatgctgtagactgtgcacttgaccctctctcagaaacaaagtgtacgttgaaatccttcactgtagaaaaaggaatctatcaaacttctaactttagagtccaaccaacagaatctattgttagatttcctaacatcacaaacttgtgcccttttggtgaagtttttaacgccaccagatttgcatctgtttatgcttggaacaggaagagaatcagcaactgtgttgctgattattctgtcctgtataattccgcatcattttccacttttaagtgttatggagtgtctcctactaaattaaatgatctctgctttactaatgtctatgcagattcatttgtaattagaggtgatgaagtcagacaaatcgctccagggcaaactggaaagattgctgattataactacaaattaccagatgattttacaggctgcgttatagcttggaattctaacaatcttgattctaaggttggtggtaattataattacctgtacagattgtttaggaagtctaatctcaaaccttttgagagagatatttcaactgaaatctatcaggccggtagcacaccttgtaatggtgttgaaggttttaattgttactttcctctgcaatcatatggtttccaacccactaatggtgttggttaccaaccatacagagtagtagtactttcttttgaacttctacatgcaccagcaactgtttgtggacctaaaaagtctactaatttggttaagaacaagtgtgtcaatttcaacttcaatggtttaacaggcacaggtgttcttactgagtctaacaaaaagtttctgcctttccaacaatttggcagagacattgctgacactactgatgctgttcgtgatccacaaacacttgagattcttgacattacaccatgttcttttggtggtgtcagtgttataacaccaggaacaaatacttctaaccaggttgctgttctttatcaggatgttaactgcacagaagtccctgttgctattcatgcagatcaacttactcctacttggcgtgtttattctacaggttctaatgtttttcaaacacgtgcaggctgtttaataggggctgaacatgtcaacaactcatatgagtgtgacatacccattggtgcaggtatatgcgctagttatcagactcagactaattctcctcggagagcaagaagtgtagctagtcaatccatcattgcctacactatgtcacttggtgcagaaaattcagttgcttactctaataactctattgccatacccacaaattttactattagcgttaccacagaaattctaccagtgtctatgaccaagacatcagtagattgtacaatgtacatttgtggtgattcaactgaatgcagcaatcttttgttgcaatatggcagtttttgtacacaattaaaccgtgctttaactggaatagctgttgaacaagacaaaaacacccaagaagtttttgcacaagtcaaacaaatttacaagacaccaccaattaaagattttggcggttttaattttagccagatactgccagatccatcaaaaccaagcaagaggtcatttattgaagatctactgttcaacaaagtgacacttgcagatgctggcttcatcaaacaatatggtgattgccttggtgatattgctgctagagacctcatttgtgcacaaaagtttaacggccttactgttttgccacctttgctcacagatgaaatgattgctcaatacacttctgcactgttagcaggtacaatcacttctggttggacttttggtgcaggtgctgcattacaaataccatttgctatgcaaatggcttataggtttaatggtattggagttacacagaatgttctctatgagaaccaaaaattgattgccaaccaatttaatagtgctattggcaaaattcaagactcactttcttccacagcaagtgcacttggaaaacttcaagatgtggtcaaccaaaatgcacaagctttaaacacgcttgttaaacaacttagctccaattttggtgcaatttcaagtgttttaaacgacatcctttcacgtcttgacaaagttgaggctgaagtgcaaattgataggttgatcacaggcagacttcaaagtttgcagacatatgtgactcaacaattaattagagctgcagaaatcagagcttctgctaatcttgctgctactaaaatgtcagagtgtgtacttggacaatcaaaaagagttgacttttgcggaaagggctatcatcttatgtcatttcctcagtcagcacctcatggtgtcgtctttttgcatgtgacttatgtccctgcacaagaaaagaacttcacaactgctcctgccatttgtcatgatggaaaagcacactttcctcgtgaaggtgtctttgtttcaaatggcacacactggtttgtaacacaaaggaatttttatgaaccacaaatcattactacagacaacacatttgtgtctggtaactgtgatgttgtaataggaattgtcaacaacacagtttatgatcctttgcaacctgaattagactcattcaaggaggagcttgataaatacttcaagaaccatacctcaccagatgttgatttaggtgacatctctggcattaatgcttcagttgtaaacattcagaaagaaatcgaccgcctcaatgaggttgccaagaatttaaatgaatctctcatcgatctccaagaacttggaaagtatgagcagtatataaaatggccatggtacatttggctaggttttatagctggcttgattgccatagtaatggtgacaattatgctttgctgtatgaccagttgctgtagttgtctcaagggctgttgttcttgtggatcctgctgcaaatttgacgaggacgactctgagccagtgctcaaaggagtcaaattacattacacataactatcacagcctctcctggaaagacagaaaatctaaacaatttatagcattctcattgctacctggccccgtaagaggcagtcatagctatggccgtgttggtcctaaggctacattggctgctgtctttattggtccatttattgtagcatgtatgctaggcattggcctagtttatttattgcaattgcaagttcaaatttttcatgttaaggataccatacgtgtgactggcaagccagccactgtgtcttatactacaagtacaccagtaacaccgagcgcgacgacgctcgatggtactacgtatactttaattagacccactagctcttatacaagagtttatcttggtactccaagaggttttgattatagtacatttgggcctaagaccctagattatgttactaatctaaacctcatcttaattctggtcgtccatatacttttaaggcattgtccaggcatatgaggccaacagccacatggatttggcatgtgagtgatgcatggttacgccgcacgcgggactttggtgtcattcgcctagaagatttttgttttcaatttaattatagccaaccccgagttggttattgtagagttcctttaaaggcttggtgtagcaaccagggtaaatttgcagcgcagtttaccctaaaaagttgcgaaaaaccaggtcacgaaaaatttattactagcttcacggcctacggcagaactgtccaacaggccgttagcaagttagtagaagaagctgttgattttattctttttagggccacgcagctcgaaagaaatgtttaatttattccttacagacacagtatggtatgtggggcagattatttttatattcgcagtgtgtttgatggtcaccataattgtggttgccttccttgcgtctatcaaactttgtattcaactttgcggtttatgtaatactttggtgctgtccccttctatttatttgtatgataggagtaagcagctttataagtactataatgaagaaatgagactgcccctattagaggtggatgatatctaatccaaacattatgagtagtactactcaggccccagagcccgtctatcaatggaccgccgacgaggcagttcaattccttaaggaatggaacttctcgttgggcattatactactctttattactatcatactacagttcggttacacgagccgtagcatgtttatttatgttgtgaaaatgataatcttgtggttaatgtggccactgactattgttttgtgtattttcaattgcgtgtatgcgctaaataatgtgtatcttggattttctatagtgtttactatagtgtccattgtaatctggatcatgtattttgtgaacagcataaggttgtttatcaggactggtagctggtggagcttcaaccccgaaacaaacaaccttatgtgtatagatatgaaaggtaccgtgtatgttagacccattattgaggattaccatacactaacagccactattattcgtggccacctctacatgcaaggtgttaagctaggcaccggtttctctttgtctgacttgcccgcttatgttacagttgctaaggtgtcacacctttgcacttataagcgcgcattcttagacaaggtagacggtgttagcggttttgctgtttatgtgaagtccaaggtcggaaattaccgactgccctcaaacaaaccgagtggcgcggacaccgcattgttgagaacctaatctaaactttaaggagagaatgaatcctatgtcggcgctcggtggtaacccctcgcgagaaagtcgggataggacactctctatcagaatggatgtcttgctgtcataacagatagagaaggttgtggcagaccctgtatcaattagttgaaagagattgcaaaatagagaatgtgtgagagaagttagcaaggtcctacgtctaaccataagaacggcgataggcgccccctgggaacagctcacatcagggtactattcctgcaatgccctagtaaatgaatgaagttgatcatggccaattggaagaatcacaaaaaaaaaaaaaaaaaaaacggccggttt

SEQ ID NO: 35 - DNA, 7341 bp, Artificial Sequence
  pcDNA34_syn_N
agtacttaatacgactcactataggctagccgccaccatggtgtctgataatggacctcaaaatcagcgaaatgcacctcgcattacgtttggtggaccatcagattcaactggcagtaaccagaatggagaacgaagtggtgcgcgatcaaaacaacgccgcccgcaaggtttacccaataatactgcgtcttggttcaccgctctcactcaacatggcaaggaagatttaaaattccctcgaggacaaggcgttccaattaacaccaatagcagtccagatgaccaaattggctactaccgccgcgccacaagacgaattcgtggtggtgatggtaaaatgaaagatctcagtccaagatggtatttctactatctaggaactgggccagaagctggacttccttatggtgctaacaaagatggcatcatatgggttgcaactgagggagccttgaatacaccaaaagatcacattggcaccagaaatcctgctaacaatgctgcaatcgtgctacaacttcctcaaggaacaacattaccaaaaggtttttacgcagaagggtctagaggtggaagtcaagcctcttctagatcatcatcacgtagtcgcaacagttcaagaaattcaactccaggttcaagtagaggaacttctcctgctagaatggctggaaatggaggtgatgctgctcttgctttgttactacttgacagattgaaccagcttgagagcaaaatgtctggtaaaggccaacaacaacaaggccaaactgtcactaagaaatctgctgctgaggcttctaagaagcctagacaaaaacgtactgccactaaagcatacaatgtaacacaagctttcggcagacgtggtccagaacaaactcaaggaaattttggggatcaggaactaatcagacaaggaactgattacaaacattggccgcaaattgcacaatttgctccttctgcttcagcgttctttggaatgtcgagaattggaatggaagtcacaccttcgggaacatggttgacctatacaggtgccatcaaattggatgacaaagatccaaatttcaaagatcaagtcattttgctgaataagcatattgacgcatacaaaacattcccaccaacagagcctaaaaaggacaaaaagaagaaggctgatgaaactcaagccttaccgcagagacagaagaaacagcaaactgtgactcttcttcctgctgcagatttggatgatttctccaaacaattgcaacaatccatgagcagtgctgactcaactcaggcctaagcggccgcttcgagcagacatgataagataaagggttcgatccctaccggttagtaatgagtttgatatctcgacaatcaacctctggattacaaaatttgtgaaagattgactggtattcttaactatgttgctccttttacgctatgtggatacgctgctttaatgcctttgtatcatgctattgcttcccgtatggctttcattttctcctccttgtataaatcctggttgctgtctctttatgaggagttgtggcccgttgtcaggcaacgtggcgtggtgtgcactgtgtttgctgacgcaacccccactggttggggcattgccaccacctgtcagctcctttccgggactttcgctttccccctccctattgccacggcggaactcatcgccgcctgccttgcccgctgctggacaggggctcggctgttgggcactgacaattccgtggtgttgtcggggaagctgacgtcctttccatggctgctcgcctgtgttgccacctggattctgcgcgggacgtccttctgctacgtcccttcggccctcaatccagcggaccttccttcccgcggcctgctgccggctctgcggcctcttccgcgtcttcgccttcgccctcagacgagtcggatctccctttgggccgcctccccgcctggaaacgggggaggctaactgaaacacggaaggagacaataccggaaggaacccgcgctatgacggcaataaaaagacagaataaaacgcacgggtgttgggtcgtttgttcataaacgcggggttcggtcccagggctggcactctgtcgataccccaccgagaccccattggggccaatacgcccgcgtttcttccttttccccaccccaccccccaagttcgggtgaaggcccagggctcgcagccaacgtcggggcggcaggccctgccatagcagatctgcgcagctggggctctagggggtatccccacgcgccctgtagcggcgcattaagcgcggcgggtgtggtggttacgcgcagcgtgaccgctacacttgccagcgccctagcgcccgctcctttcgctttcttcccttcctttctcgccacgttcgccggctttccccgtcaagctctaaatcggggcatccctttagggttccgatttagtgctttacggcacctcgaccccaaaaaacttgattagggtgatggttcacgtagtgggccatcgccctgatagacggtttttcgccctttgacgttggagtccacgttctttaatagtggactcttgttccaaactggaacaacactcaaccctatctcggtctattcttttgatttataagggattttggggatttcggcctattggttaaaaaatgagctgatttaacaaaaatttaacgcgaattaattctgtggaatgtgtgtcagttagggtgtggaaagtccccaggctccccagcaggcagaagtatgcaaagcatgcatctcaattagtcagcaaccaggtgtggaaagtccccaggctccccagcaggcagaagtatgcaaagcatgcatctcaattagtcagcaaccatagtcccgcccctaactccgcccatcccgcccctaactccgcccagttccgcccattctccgccccatggctgactaattttttttatttatgcagaggccgaggccgcctctgcctctgagctattccagaagtagtgaggaggcttttttggaggcctaggcttttgcaaaaagctcccgggagcttgtatatccattttcggatctgatcaagagacaggatgaggatcgtttcgcatgattgaacaagatggattgcacgcaggttctccggccgcttgggtggagaggctattcggctatgactgggcacaacagacaatcggctgctctgatgccgccgtgttccggctgtcagcgcaggggcgcccggttctttttgtcaagaccgacctgtccggtgccctgaatgaactgcaggacgaggcagcgcggctatcgtggctggccacgacgggcgttccttgcgcagctgtgctcgacgttgtcactgaagcgggaagggactggctgctattgggcgaagtgccggggcaggatctcctgtcatctcaccttgctcctgccgagaaagtatccatcatggctgatgcaatgcggcggctgcatacgcttgatccggctacctgcccattcgaccaccaagcgaaacatcgcatcgagcgagcacgtactcggatggaagccggtcttgtcgatcaggatgatctggacgaagagcatcaggggctcgcgccagccgaactgttcgccaggctcaaggcgcgcatgcccgacggcgaggatctcgtcgtgacccatggcgatgcctgcttgccgaatatcatggtggaaaatggccgcttttctggattcatcgactgtggccggctgggtgtggcggaccgctatcaggacatagcgttggctacccgtgatattgctgaagagcttggcggcgaatgggctgaccgcttcctcgtgctttacggtatcgccgctcccgattcgcagcgcatcgccttctatcgccttcttgacgagttcttctgagcgggactctggggttcgcgaaatgaccgaccaagcgacgcccaacctgccatcacgagatttcgattccaccgccgccttctatgaaaggttgggcttcggaatcgttttccgggacgccggctggatgatcctccagcgcggggatctcatgctggagttcttcgcccaccccaacttgtttattgcagcttataatggttacaaataaagcaatagcatcacaaatttcacaaataaagcatttttttcactgcattctagttgtggtttgtccaaactcatcaatgtatcttatcatgtctgtataccgtcgacctctagctagagcttggcgtaatcatggtcatagctgtttcctgtgtgaaattgttatccgctcacaattccacacaacatacgagccggaagcataaagtgtaaagcctggggtgcctaatgagtgagctaactcacattaattgcgttgcgctcactgcccgctttccagtcgggaaacctgtcgtgccagctgcattaatgaatcggccaacgcgcggggagaggcggtttgcgtattgggcgctcttccgcttcctcgctcactgactcgctgcgctcggtcgttcggctgcggcgagcggtatcagctcactcaaaggcggtaatacggttatccacagaatcaggggataacgcaggaaagaacatgtgagcaaaaggccagcaaaaggccaggaaccgtaaaaaggccgcgttgctggcgtttttccataggctccgcccccctgacgagcatcacaaaaatcgacgctcaagtcagaggtggcgaaacccgacaggactataaagataccaggcgtttccccctggaagctccctcgtgcgctctcctgttccgaccctgccgcttaccggatacctgtccgcctttctcccttcgggaagcgtggcgctttctcaatgctcacgctgtaggtatctcagttcggtgtaggtcgttcgctccaagctgggctgtgtgcacgaaccccccgttcagcccgaccgctgcgccttatccggtaactatcgtcttgagtccaacccggtaagacacgacttatcgccactggcagcagccactggtaacaggattagcagagcgaggtatgtaggcggtgctacagagttcttgaagtggtggcctaactacggctacactagaaggacagtatttggtatctgcgctctgctgaagccagttaccttcggaaaaagagttggtagctcttgatccggcaaacaaaccaccgctggtagcggtggtttttttgtttgcaagcagcagattacgcgcagaaaaaaaggatctcaagaagatcctttgatcttttctacggggtctgacgctcagtggaacgaaaactcacgttaagggattttggtcatgagattatcaaaaaggatcttcacctagatccttttaaattaaaaatgaagttttaaatcaatctaaagtatatatgagtaaacttggtctgacagttaccaatgcttaatcagtgaggcacctatctcagcgatctgtctatttcgttcatccatagttgcctgactccccgtcgtgtagataactacgatacgggagggcttaccatctggccccagtgctgcaatgataccgcgagacccacgctcaccggctccagatttatcagcaataaaccagccagccggaagggccgagcgcagaagtggtcctgcaactttatccgcctccatccagtctattaattgttgccgggaagctagagtaagtagttcgccagttaatagtttgcgcaacgttgttgccattgctacaggcatcgtggtgtcacgctcgtcgtttggtatggcttcattcagctccggttcccaacgatcaaggcgagttacatgatcccccatgttgtgcaaaaaagcggttagctccttcggtcctccgatcgttgtcagaagtaagttggccgcagtgttatcactcatggttatggcagcactgcataattctcttactgtcatgccatccgtaagatgcttttctgtgactggtgagtactcaaccaagtcattctgagaatagtgtatgcggcgaccgagttgctcttgcccggcgtcaatacgggataataccgcgccacatagcagaactttaaaagtgctcatcattggaaaacgttcttcggggcgaaaactctcaaggatcttaccgctgttgagatccagttcgatgtaacccactcgtgcacccaactgatcttcagcatcttttactttcaccagcgtttctgggtgagcaaaaacaggaaggcaaaatgccgcaaaaaagggaataagggcgacacggaaatgttgaatactcatactcttcctttttcaatattattgaagcatttatcagggttattgtctcatgagcggatacatatttgaatgtatttagaaaaataaacaaataggggttccgcgcacatttccccgaaaagtgccacctgacgtcgacggatcgggagatctcccgatcccctatggtcgactctcagtacaatctgctctgatgccgcatagttaagccagtatctgctccctgcttgtgtgttggaggtcgctgagtagtgcgcgagcaaaatttaagctacaacaaggcaaggcttgaccgacaattgcatgaagaatctgcttagggttaggcgttttgcgctgcttcgcgatgtacgggccagatatacgcgttgacattgattattgactagttattaatagtaatcaattacggggtcattagttcatagcccatatatggagttccgcgttacataacttacggtaaatggcccgcctggctgaccgcccaacgacccccgcccattgacgtcaataatgacgtatgttcccatagtaacgccaatagggactttccattgacgtcaatgggtggagtatttacggtaaactgcccacttggcagtacatcaagtgtatcatatgccaagtacgccccctattgacgtcaatgacggtaaatggcccgcctggcattatgcccagtacatgaccttatgggactttcctacttggcagtacatctacgtattagtcatcgctattaccatggtgatgcggttttggcagtacatcaatgggcgtggatagcggtttgactcacggggatttccaagtctccaccccattgacgtcaatgggagtttgttttggcaccaaaatcaacgggactttccaaaatgtcgtaacaactccgccccattgacgcaaatgggcggtaggcgtgtacggtgggaggtctatataagcagagctcgtttagtgaaccgtcagatcgcctggagacgccatccacgctgttttgacctccatagaagacaccgggaccgatccagcctccggactctagaggatcgaaccctt

SEQ ID NO: 36 - DNA, 6309 bp, Artificial Sequence
  pcDNA34_syn_E
agtacttaatacgactcactataggctagccgccaccatggtgtactcattcgtttcggaagagacaggtacgttaatagttaatagcgtacttctttttcttgctttcgtggtattcttgctagttacactagccattcttactgcgcttcgattgtgtgcgtactgttgcaatattgttaacgtgagtcttgtaaaaccttctttttacgtttactctcgtgttaaaaatctgaattcttctcgggttcctgatcttctggtctaagcggccgcttcgagcagacatgataagataaagggttcgatccctaccggttagtaatgagtttgatatctcgacaatcaacctctggattacaaaatttgtgaaagattgactggtattcttaactatgttgctccttttacgctatgtggatacgctgctttaatgcctttgtatcatgctattgcttcccgtatggctttcattttctcctccttgtataaatcctggttgctgtctctttatgaggagttgtggcccgttgtcaggcaacgtggcgtggtgtgcactgtgtttgctgacgcaacccccactggttggggcattgccaccacctgtcagctcctttccgggactttcgctttccccctccctattgccacggcggaactcatcgccgcctgccttgcccgctgctggacaggggctcggctgttgggcactgacaattccgtggtgttgtcggggaagctgacgtcctttccatggctgctcgcctgtgttgccacctggattctgcgcgggacgtccttctgctacgtcccttcggccctcaatccagcggaccttccttcccgcggcctgctgccggctctgcggcctcttccgcgtcttcgccttcgccctcagacgagtcggatctccctttgggccgcctccccgcctggaaacgggggaggctaactgaaacacggaaggagacaataccggaaggaacccgcgctatgacggcaataaaaagacagaataaaacgcacgggtgttgggtcgtttgttcataaacgcggggttcggtcccagggctggcactctgtcgataccccaccgagaccccattggggccaatacgcccgcgtttcttccttttccccaccccaccccccaagttcgggtgaaggcccagggctcgcagccaacgtcggggcggcaggccctgccatagcagatctgcgcagctggggctctagggggtatccccacgcgccctgtagcggcgcattaagcgcggcgggtgtggtggttacgcgcagcgtgaccgctacacttgccagcgccctagcgcccgctcctttcgctttcttcccttcctttctcgccacgttcgccggctttccccgtcaagctctaaatcggggcatccctttagggttccgatttagtgctttacggcacctcgaccccaaaaaacttgattagggtgatggttcacgtagtgggccatcgccctgatagacggtttttcgccctttgacgttggagtccacgttctttaatagtggactcttgttccaaactggaacaacactcaaccctatctcggtctattcttttgatttataagggattttggggatttcggcctattggttaaaaaatgagctgatttaacaaaaatttaacgcgaattaattctgtggaatgtgtgtcagttagggtgtggaaagtccccaggctccccagcaggcagaagtatgcaaagcatgcatctcaattagtcagcaaccaggtgtggaaagtccccaggctccccagcaggcagaagtatgcaaagcatgcatctcaattagtcagcaaccatagtcccgcccctaactccgcccatcccgcccctaactccgcccagttccgcccattctccgccccatggctgactaattttttttatttatgcagaggccgaggccgcctctgcctctgagctattccagaagtagtgaggaggcttttttggaggcctaggcttttgcaaaaagctcccgggagcttgtatatccattttcggatctgatcaagagacaggatgaggatcgtttcgcatgattgaacaagatggattgcacgcaggttctccggccgcttgggtggagaggctattcggctatgactgggcacaacagacaatcggctgctctgatgccgccgtgttccggctgtcagcgcaggggcgcccggttctttttgtcaagaccgacctgtccggtgccctgaatgaactgcaggacgaggcagcgcggctatcgtggctggccacgacgggcgttccttgcgcagctgtgctcgacgttgtcactgaagcgggaagggactggctgctattgggcgaagtgccggggcaggatctcctgtcatctcaccttgctcctgccgagaaagtatccatcatggctgatgcaatgcggcggctgcatacgcttgatccggctacctgcccattcgaccaccaagcgaaacatcgcatcgagcgagcacgtactcggatggaagccggtcttgtcgatcaggatgatctggacgaagagcatcaggggctcgcgccagccgaactgttcgccaggctcaaggcgcgcatgcccgacggcgaggatctcgtcgtgacccatggcgatgcctgcttgccgaatatcatggtggaaaatggccgcttttctggattcatcgactgtggccggctgggtgtggcggaccgctatcaggacatagcgttggctacccgtgatattgctgaagagcttggcggcgaatgggctgaccgcttcctcgtgctttacggtatcgccgctcccgattcgcagcgcatcgccttctatcgccttcttgacgagttcttctgagcgggactctggggttcgcgaaatgaccgaccaagcgacgcccaacctgccatcacgagatttcgattccaccgccgccttctatgaaaggttgggcttcggaatcgttttccgggacgccggctggatgatcctccagcgcggggatctcatgctggagttcttcgcccaccccaacttgtttattgcagcttataatggttacaaataaagcaatagcatcacaaatttcacaaataaagcatttttttcactgcattctagttgtggtttgtccaaactcatcaatgtatcttatcatgtctgtataccgtcgacctctagctagagcttggcgtaatcatggtcatagctgtttcctgtgtgaaattgttatccgctcacaattccacacaacatacgagccggaagcataaagtgtaaagcctggggtgcctaatgagtgagctaactcacattaattgcgttgcgctcactgcccgctttccagtcgggaaacctgtcgtgccagctgcattaatgaatcggccaacgcgcggggagaggcggtttgcgtattgggcgctcttccgcttcctcgctcactgactcgctgcgctcggtcgttcggctgcggcgagcggtatcagctcactcaaaggcggtaatacggttatccacagaatcaggggataacgcaggaaagaacatgtgagcaaaaggccagcaaaaggccaggaaccgtaaaaaggccgcgttgctggcgtttttccataggctccgcccccctgacgagcatcacaaaaatcgacgctcaagtcagaggtggcgaaacccgacaggactataaagataccaggcgtttccccctggaagctccctcgtgcgctctcctgttccgaccctgccgcttaccggatacctgtccgcctttctcccttcgggaagcgtggcgctttctcaatgctcacgctgtaggtatctcagttcggtgtaggtcgttcgctccaagctgggctgtgtgcacgaaccccccgttcagcccgaccgctgcgccttatccggtaactatcgtcttgagtccaacccggtaagacacgacttatcgccactggcagcagccactggtaacaggattagcagagcgaggtatgtaggcggtgctacagagttcttgaagtggtggcctaactacggctacactagaaggacagtatttggtatctgcgctctgctgaagccagttaccttcggaaaaagagttggtagctcttgatccggcaaacaaaccaccgctggtagcggtggtttttttgtttgcaagcagcagattacgcgcagaaaaaaaggatctcaagaagatcctttgatcttttctacggggtctgacgctcagtggaacgaaaactcacgttaagggattttggtcatgagattatcaaaaaggatcttcacctagatccttttaaattaaaaatgaagttttaaatcaatctaaagtatatatgagtaaacttggtctgacagttaccaatgcttaatcagtgaggcacctatctcagcgatctgtctatttcgttcatccatagttgcctgactccccgtcgtgtagataactacgatacgggagggcttaccatctggccccagtgctgcaatgataccgcgagacccacgctcaccggctccagatttatcagcaataaaccagccagccggaagggccgagcgcagaagtggtcctgcaactttatccgcctccatccagtctattaattgttgccgggaagctagagtaagtagttcgccagttaatagtttgcgcaacgttgttgccattgctacaggcatcgtggtgtcacgctcgtcgtttggtatggcttcattcagctccggttcccaacgatcaaggcgagttacatgatcccccatgttgtgcaaaaaagcggttagctccttcggtcctccgatcgttgtcagaagtaagttggccgcagtgttatcactcatggttatggcagcactgcataattctcttactgtcatgccatccgtaagatgcttttctgtgactggtgagtactcaaccaagtcattctgagaatagtgtatgcggcgaccgagttgctcttgcccggcgtcaatacgggataataccgcgccacatagcagaactttaaaagtgctcatcattggaaaacgttcttcggggcgaaaactctcaaggatcttaccgctgttgagatccagttcgatgtaacccactcgtgcacccaactgatcttcagcatcttttactttcaccagcgtttctgggtgagcaaaaacaggaaggcaaaatgccgcaaaaaagggaataagggcgacacggaaatgttgaatactcatactcttcctttttcaatattattgaagcatttatcagggttattgtctcatgagcggatacatatttgaatgtatttagaaaaataaacaaataggggttccgcgcacatttccccgaaaagtgccacctgacgtcgacggatcgggagatctcccgatcccctatggtcgactctcagtacaatctgctctgatgccgcatagttaagccagtatctgctccctgcttgtgtgttggaggtcgctgagtagtgcgcgagcaaaatttaagctacaacaaggcaaggcttgaccgacaattgcatgaagaatctgcttagggttaggcgttttgcgctgcttcgcgatgtacgggccagatatacgcgttgacattgattattgactagttattaatagtaatcaattacggggtcattagttcatagcccatatatggagttccgcgttacataacttacggtaaatggcccgcctggctgaccgcccaacgacccccgcccattgacgtcaataatgacgtatgttcccatagtaacgccaatagggactttccattgacgtcaatgggtggagtatttacggtaaactgcccacttggcagtacatcaagtgtatcatatgccaagtacgccccctattgacgtcaatgacggtaaatggcccgcctggcattatgcccagtacatgaccttatgggactttcctacttggcagtacatctacgtattagtcatcgctattaccatggtgatgcggttttggcagtacatcaatgggcgtggatagcggtttgactcacggggatttccaagtctccaccccattgacgtcaatgggagtttgttttggcaccaaaatcaacgggactttccaaaatgtcgtaacaactccgccccattgacgcaaatgggcggtaggcgtgtacggtgggaggtctatataagcagagctcgtttagtgaaccgtcagatcgcctggagacgccatccacgctgttttgacctccatagaagacaccgggaccgatccagcctccggactctagaggatcgaaccctt

SEQ ID NO: 37 - DNA, 6750 bp, Artificial Sequence
  pcDNA34_syn_M
agtacttaatacgactcactataggctagccgccaccatggtggcagattccaacggtactattaccgttgaggagctgaaaaagctccttgaacaatggaacctagtaataggtttcctattccttacatggatttgcctgctgcaatttgcctatgccaacaggaataggtttttgtacatcattaagttgattttcctctggctgttatggccagtaactttagcttgttttgtgcttgctgctgtttacagaataaattggatcaccggtggaattgctattgcaatggcttgtcttgtaggattgatgtggctaagctacttcattgcttctttcagactgtttgcgcgtacgcgttccatgtggtcattcaatccagaaactaacattcttctcaacgtgccactccatggaactattctgactagaccgcttctagaaagtgaactcgtaatcggagctgttatccttcgtggacatcttcgtattgctggacatcatctaggacgctgtgacatcaaggatctacctaaagaaatcactgttgctacatcacgaacgctttcttattacaaattgggagcttcacagcgtgtagcaggtgattcaggttttgctgcatatagtcgctacaggattggcaactataaattaaacacagaccattccagtagcagtgacaatattgctttgcttgtacagtaagcggccgcttcgagcagacatgataagataaagggttcgatccctaccggttagtaatgagtttgatatctcgacaatcaacctctggattacaaaatttgtgaaagattgactggtattcttaactatgttgctccttttacgctatgtggatacgctgctttaatgcctttgtatcatgctattgcttcccgtatggctttcattttctcctccttgtataaatcctggttgctgtctctttatgaggagttgtggcccgttgtcaggcaacgtggcgtggtgtgcactgtgtttgctgacgcaacccccactggttggggcattgccaccacctgtcagctcctttccgggactttcgctttccccctccctattgccacggcggaactcatcgccgcctgccttgcccgctgctggacaggggctcggctgttgggcactgacaattccgtggtgttgtcggggaagctgacgtcctttccatggctgctcgcctgtgttgccacctggattctgcgcgggacgtccttctgctacgtcccttcggccctcaatccagcggaccttccttcccgcggcctgctgccggctctgcggcctcttccgcgtcttcgccttcgccctcagacgagtcggatctccctttgggccgcctccccgcctggaaacgggggaggctaactgaaacacggaaggagacaataccggaaggaacccgcgctatgacggcaataaaaagacagaataaaacgcacgggtgttgggtcgtttgttcataaacgcggggttcggtcccagggctggcactctgtcgataccccaccgagaccccattggggccaatacgcccgcgtttcttccttttccccaccccaccccccaagttcgggtgaaggcccagggctcgcagccaacgtcggggcggcaggccctgccatagcagatctgcgcagctggggctctagggggtatccccacgcgccctgtagcggcgcattaagcgcggcgggtgtggtggttacgcgcagcgtgaccgctacacttgccagcgccctagcgcccgctcctttcgctttcttcccttcctttctcgccacgttcgccggctttccccgtcaagctctaaatcggggcatccctttagggttccgatttagtgctttacggcacctcgaccccaaaaaacttgattagggtgatggttcacgtagtgggccatcgccctgatagacggtttttcgccctttgacgttggagtccacgttctttaatagtggactcttgttccaaactggaacaacactcaaccctatctcggtctattcttttgatttataagggattttggggatttcggcctattggttaaaaaatgagctgatttaacaaaaatttaacgcgaattaattctgtggaatgtgtgtcagttagggtgtggaaagtccccaggctccccagcaggcagaagtatgcaaagcatgcatctcaattagtcagcaaccaggtgtggaaagtccccaggctccccagcaggcagaagtatgcaaagcatgcatctcaattagtcagcaaccatagtcccgcccctaactccgcccatcccgcccctaactccgcccagttccgcccattctccgccccatggctgactaattttttttatttatgcagaggccgaggccgcctctgcctctgagctattccagaagtagtgaggaggcttttttggaggcctaggcttttgcaaaaagctcccgggagcttgtatatccattttcggatctgatcaagagacaggatgaggatcgtttcgcatgattgaacaagatggattgcacgcaggttctccggccgcttgggtggagaggctattcggctatgactgggcacaacagacaatcggctgctctgatgccgccgtgttccggctgtcagcgcaggggcgcccggttctttttgtcaagaccgacctgtccggtgccctgaatgaactgcaggacgaggcagcgcggctatcgtggctggccacgacgggcgttccttgcgcagctgtgctcgacgttgtcactgaagcgggaagggactggctgctattgggcgaagtgccggggcaggatctcctgtcatctcaccttgctcctgccgagaaagtatccatcatggctgatgcaatgcggcggctgcatacgcttgatccggctacctgcccattcgaccaccaagcgaaacatcgcatcgagcgagcacgtactcggatggaagccggtcttgtcgatcaggatgatctggacgaagagcatcaggggctcgcgccagccgaactgttcgccaggctcaaggcgcgcatgcccgacggcgaggatctcgtcgtgacccatggcgatgcctgcttgccgaatatcatggtggaaaatggccgcttttctggattcatcgactgtggccggctgggtgtggcggaccgctatcaggacatagcgttggctacccgtgatattgctgaagagcttggcggcgaatgggctgaccgcttcctcgtgctttacggtatcgccgctcccgattcgcagcgcatcgccttctatcgccttcttgacgagttcttctgagcgggactctggggttcgcgaaatgaccgaccaagcgacgcccaacctgccatcacgagatttcgattccaccgccgccttctatgaaaggttgggcttcggaatcgttttccgggacgccggctggatgatcctccagcgcggggatctcatgctggagttcttcgcccaccccaacttgtttattgcagcttataatggttacaaataaagcaatagcatcacaaatttcacaaataaagcatttttttcactgcattctagttgtggtttgtccaaactcatcaatgtatcttatcatgtctgtataccgtcgacctctagctagagcttggcgtaatcatggtcatagctgtttcctgtgtgaaattgttatccgctcacaattccacacaacatacgagccggaagcataaagtgtaaagcctggggtgcctaatgagtgagctaactcacattaattgcgttgcgctcactgcccgctttccagtcgggaaacctgtcgtgccagctgcattaatgaatcggccaacgcgcggggagaggcggtttgcgtattgggcgctcttccgcttcctcgctcactgactcgctgcgctcggtcgttcggctgcggcgagcggtatcagctcactcaaaggcggtaatacggttatccacagaatcaggggataacgcaggaaagaacatgtgagcaaaaggccagcaaaaggccaggaaccgtaaaaaggccgcgttgctggcgtttttccataggctccgcccccctgacgagcatcacaaaaatcgacgctcaagtcagaggtggcgaaacccgacaggactataaagataccaggcgtttccccctggaagctccctcgtgcgctctcctgttccgaccctgccgcttaccggatacctgtccgcctttctcccttcgggaagcgtggcgctttctcaatgctcacgctgtaggtatctcagttcggtgtaggtcgttcgctccaagctgggctgtgtgcacgaaccccccgttcagcccgaccgctgcgccttatccggtaactatcgtcttgagtccaacccggtaagacacgacttatcgccactggcagcagccactggtaacaggattagcagagcgaggtatgtaggcggtgctacagagttcttgaagtggtggcctaactacggctacactagaaggacagtatttggtatctgcgctctgctgaagccagttaccttcggaaaaagagttggtagctcttgatccggcaaacaaaccaccgctggtagcggtggtttttttgtttgcaagcagcagattacgcgcagaaaaaaaggatctcaagaagatcctttgatcttttctacggggtctgacgctcagtggaacgaaaactcacgttaagggattttggtcatgagattatcaaaaaggatcttcacctagatccttttaaattaaaaatgaagttttaaatcaatctaaagtatatatgagtaaacttggtctgacagttaccaatgcttaatcagtgaggcacctatctcagcgatctgtctatttcgttcatccatagttgcctgactccccgtcgtgtagataactacgatacgggagggcttaccatctggccccagtgctgcaatgataccgcgagacccacgctcaccggctccagatttatcagcaataaaccagccagccggaagggccgagcgcagaagtggtcctgcaactttatccgcctccatccagtctattaattgttgccgggaagctagagtaagtagttcgccagttaatagtttgcgcaacgttgttgccattgctacaggcatcgtggtgtcacgctcgtcgtttggtatggcttcattcagctccggttcccaacgatcaaggcgagttacatgatcccccatgttgtgcaaaaaagcggttagctccttcggtcctccgatcgttgtcagaagtaagttggccgcagtgttatcactcatggttatggcagcactgcataattctcttactgtcatgccatccgtaagatgcttttctgtgactggtgagtactcaaccaagtcattctgagaatagtgtatgcggcgaccgagttgctcttgcccggcgtcaatacgggataataccgcgccacatagcagaactttaaaagtgctcatcattggaaaacgttcttcggggcgaaaactctcaaggatcttaccgctgttgagatccagttcgatgtaacccactcgtgcacccaactgatcttcagcatcttttactttcaccagcgtttctgggtgagcaaaaacaggaaggcaaaatgccgcaaaaaagggaataagggcgacacggaaatgttgaatactcatactcttcctttttcaatattattgaagcatttatcagggttattgtctcatgagcggatacatatttgaatgtatttagaaaaataaacaaataggggttccgcgcacatttccccgaaaagtgccacctgacgtcgacggatcgggagatctcccgatcccctatggtcgactctcagtacaatctgctctgatgccgcatagttaagccagtatctgctccctgcttgtgtgttggaggtcgctgagtagtgcgcgagcaaaatttaagctacaacaaggcaaggcttgaccgacaattgcatgaagaatctgcttagggttaggcgttttgcgctgcttcgcgatgtacgggccagatatacgcgttgacattgattattgactagttattaatagtaatcaattacggggtcattagttcatagcccatatatggagttccgcgttacataacttacggtaaatggcccgcctggctgaccgcccaacgacccccgcccattgacgtcaataatgacgtatgttcccatagtaacgccaatagggactttccattgacgtcaatgggtggagtatttacggtaaactgcccacttggcagtacatcaagtgtatcatatgccaagtacgccccctattgacgtcaatgacggtaaatggcccgcctggcattatgcccagtacatgaccttatgggactttcctacttggcagtacatctacgtattagtcatcgctattaccatggtgatgcggttttggcagtacatcaatgggcgtggatagcggtttgactcacggggatttccaagtctccaccccattgacgtcaatgggagtttgttttggcaccaaaatcaacgggactttccaaaatgtcgtaacaactccgccccattgacgcaaatgggcggtaggcgtgtacggtgggaggtctatataagcagagctcgtttagtgaaccgtcagatcgcctggagacgccatccacgctgttttgacctccatagaagacaccgggaccgatccagcctccggactctagaggatcgaaccctt

SEQ ID NO: 38 - DNA, 9905 bp, Artificial Sequence
  pcDNA34_syn_S
agtacttaatacgactcactataggctagcgccgccaccatggtgtttgtttttcttgttttattgccactagtctctagtcagtgtgttaatcttacaaccagaactcaattaccccctgcatacactaattctttcacacgtggtgtttattaccctgacaaagttttcagatcctcagttttacattcaactcaggacttgttcttacctttcttttccaatgttacttggttccatgctatacatgtctctgggaccaatggtactaagaggtttgataaccctgtcctaccatttaatgatggtgtttactttgcttccactgagaagtctaacataataagaggctggatttttggtactactttagattcgaaaacccagtccctacttattgttaataacgctactaatgttgttatcaaagtctgtgaatttcaattttgtaacgatccatttttgggtgtttattaccacaaaaacaacaaaagttggatggaaagtgagttcagagtttattctagtgcgaataattgcacttttgaatacgtctctcagccttttcttatggaccttgaaggaaaacagggtaatttcaaaaatcttagggaatttgtgttcaagaatattgatggttacttcaagatatactctaagcacacgcctattaatttagtgcgtgatctccctcagggtttttcggctttagaaccattggtagatttgccaataggtattaacatcactaggtttcaaactttacttgctttacatagaagttatttaactcctggtgattcttcttcaggttggacagctggtgctgcagcttattatgtgggttatcttcaacctaggacttttctactgaagtacaatgaaaatggaaccattacagatgctgtagactgtgcacttgaccctctctcagaaacaaagtgtacgttgaaatccttcactgtagaaaaaggaatctatcaaacttctaactttagagtccaaccaacagaatctattgttagatttcctaacatcacaaacttgtgcccttttggtgaagtttttaacgccaccagatttgcatctgtttatgcttggaacaggaagagaatcagcaactgtgttgctgattattctgtcctgtataattccgcatcattttccacttttaagtgttatggagtgtctcctactaaattaaatgatctctgctttactaatgtctatgcagattcatttgtaattagaggtgatgaagtcagacaaatcgctccagggcaaactggaaagattgctgattataactacaaattaccagatgattttacaggctgcgttatagcttggaattctaacaatcttgattctaaggttggtggtaattataattacctgtacagattgtttaggaagtctaatctcaaaccttttgagagagatatttcaactgaaatctatcaggccggtagcacaccttgtaatggtgttgaaggttttaattgttactttcctctgcaatcatatggtttccaacccactaatggtgttggttaccaaccatacagagtagtagtactttcttttgaacttctacatgcaccagcaactgtttgtggacctaaaaagtctactaatttggttaagaacaagtgtgtcaatttcaacttcaatggtttaacaggcacaggtgttcttactgagtctaacaaaaagtttctgcctttccaacaatttggcagagacattgctgacactactgatgctgttcgtgatccacaaacacttgagattcttgacattacaccatgttcttttggtggtgtcagtgttataacaccaggaacaaatacttctaaccaggttgctgttctttatcaggatgttaactgcacagaagtccctgttgctattcatgcagatcaacttactcctacttggcgtgtttattctacaggttctaatgtttttcaaacacgtgcaggctgtttaataggggctgaacatgtcaacaactcatatgagtgtgacatacccattggtgcaggtatatgcgctagttatcagactcagactaattctcctcggagagcaagaagtgtagctagtcaatccatcattgcctacactatgtcacttggtgcagaaaattcagttgcttactctaataactctattgccatacccacaaattttactattagcgttaccacagaaattctaccagtgtctatgaccaagacatcagtagattgtacaatgtacatttgtggtgattcaactgaatgcagcaatcttttgttgcaatatggcagtttttgtacacaattaaaccgtgctttaactggaatagctgttgaacaagacaaaaacacccaagaagtttttgcacaagtcaaacaaatttacaagacaccaccaattaaagattttggcggttttaattttagccagatactgccagatccatcaaaaccaagcaagaggtcatttattgaagatctactgttcaacaaagtgacacttgcagatgctggcttcatcaaacaatatggtgattgccttggtgatattgctgctagagacctcatttgtgcacaaaagtttaacggccttactgttttgccacctttgctcacagatgaaatgattgctcaatacacttctgcactgttagcaggtacaatcacttctggttggacttttggtgcaggtgctgcattacaaataccatttgctatgcaaatggcttataggtttaatggtattggagttacacagaatgttctctatgagaaccaaaaattgattgccaaccaatttaatagtgctattggcaaaattcaagactcactttcttccacagcaagtgcacttggaaaacttcaagatgtggtcaaccaaaatgcacaagctttaaacacgcttgttaaacaacttagctccaattttggtgcaatttcaagtgttttaaacgacatcctttcacgtcttgacaaagttgaggctgaagtgcaaattgataggttgatcacaggcagacttcaaagtttgcagacatatgtgactcaacaattaattagagctgcagaaatcagagcttctgctaatcttgctgctactaaaatgtcagagtgtgtacttggacaatcaaaaagagttgacttttgcggaaagggctatcatcttatgtcatttcctcagtcagcacctcatggtgtcgtctttttgcatgtgacttatgtccctgcacaagaaaagaacttcacaactgctcctgccatttgtcatgatggaaaagcacactttcctcgtgaaggtgtctttgtttcaaatggcacacactggtttgtaacacaaaggaatttttatgaaccacaaatcattactacagacaacacatttgtgtctggtaactgtgatgttgtaataggaattgtcaacaacacagtttatgatcctttgcaacctgaattagactcattcaaggaggagcttgataaatacttcaagaaccatacctcaccagatgttgatttaggtgacatctctggcattaatgcttcagttgtaaacattcagaaagaaatcgaccgcctcaatgaggttgccaagaatttaaatgaatctctcatcgatctccaagaacttggaaagtatgagcagtatataaaatggccatggtacatttggctaggttttatagctggcttgattgccatagtaatggtgacaattatgctttgctgtatgaccagttgctgtagttgtctcaagggctgttgttcttgtggatcctgctgcaaatttgacgaggacgactctgagccagtgctcaaaggagtcaaattacattacacataagcggccgcttcgagcagacatgataagataaagggttcgatccctaccggttagtaatgagtttgatatctcgacaatcaacctctggattacaaaatttgtgaaagattgactggtattcttaactatgttgctccttttacgctatgtggatacgctgctttaatgcctttgtatcatgctattgcttcccgtatggctttcattttctcctccttgtataaatcctggttgctgtctctttatgaggagttgtggcccgttgtcaggcaacgtggcgtggtgtgcactgtgtttgctgacgcaacccccactggttggggcattgccaccacctgtcagctcctttccgggactttcgctttccccctccctattgccacggcggaactcatcgccgcctgccttgcccgctgctggacaggggctcggctgttgggcactgacaattccgtggtgttgtcggggaagctgacgtcctttccatggctgctcgcctgtgttgccacctggattctgcgcgggacgtccttctgctacgtcccttcggccctcaatccagcggaccttccttcccgcggcctgctgccggctctgcggcctcttccgcgtcttcgccttcgccctcagacgagtcggatctccctttgggccgcctccccgcctggaaacgggggaggctaactgaaacacggaaggagacaataccggaaggaacccgcgctatgacggcaataaaaagacagaataaaacgcacgggtgttgggtcgtttgttcataaacgcggggttcggtcccagggctggcactctgtcgataccccaccgagaccccattggggccaatacgcccgcgtttcttccttttccccaccccaccccccaagttcgggtgaaggcccagggctcgcagccaacgtcggggcggcaggccctgccatagcagatctgcgcagctggggctctagggggtatccccacgcgccctgtagcggcgcattaagcgcggcgggtgtggtggttacgcgcagcgtgaccgctacacttgccagcgccctagcgcccgctcctttcgctttcttcccttcctttctcgccacgttcgccggctttccccgtcaagctctaaatcggggcatccctttagggttccgatttagtgctttacggcacctcgaccccaaaaaacttgattagggtgatggttcacgtagtgggccatcgccctgatagacggtttttcgccctttgacgttggagtccacgttctttaatagtggactcttgttccaaactggaacaacactcaaccctatctcggtctattcttttgatttataagggattttggggatttcggcctattggttaaaaaatgagctgatttaacaaaaatttaacgcgaattaattctgtggaatgtgtgtcagttagggtgtggaaagtccccaggctccccagcaggcagaagtatgcaaagcatgcatctcaattagtcagcaaccaggtgtggaaagtccccaggctccccagcaggcagaagtatgcaaagcatgcatctcaattagtcagcaaccatagtcccgcccctaactccgcccatcccgcccctaactccgcccagttccgcccattctccgccccatggctgactaattttttttatttatgcagaggccgaggccgcctctgcctctgagctattccagaagtagtgaggaggcttttttggaggcctaggcttttgcaaaaagctcccgggagcttgtatatccattttcggatctgatcaagagacaggatgaggatcgtttcgcatgattgaacaagatggattgcacgcaggttctccggccgcttgggtggagaggctattcggctatgactgggcacaacagacaatcggctgctctgatgccgccgtgttccggctgtcagcgcaggggcgcccggttctttttgtcaagaccgacctgtccggtgccctgaatgaactgcaggacgaggcagcgcggctatcgtggctggccacgacgggcgttccttgcgcagctgtgctcgacgttgtcactgaagcgggaagggactggctgctattgggcgaagtgccggggcaggatctcctgtcatctcaccttgctcctgccgagaaagtatccatcatggctgatgcaatgcggcggctgcatacgcttgatccggctacctgcccattcgaccaccaagcgaaacatcgcatcgagcgagcacgtactcggatggaagccggtcttgtcgatcaggatgatctggacgaagagcatcaggggctcgcgccagccgaactgttcgccaggctcaaggcgcgcatgcccgacggcgaggatctcgtcgtgacccatggcgatgcctgcttgccgaatatcatggtggaaaatggccgcttttctggattcatcgactgtggccggctgggtgtggcggaccgctatcaggacatagcgttggctacccgtgatattgctgaagagcttggcggcgaatgggctgaccgcttcctcgtgctttacggtatcgccgctcccgattcgcagcgcatcgccttctatcgccttcttgacgagttcttctgagcgggactctggggttcgcgaaatgaccgaccaagcgacgcccaacctgccatcacgagatttcgattccaccgccgccttctatgaaaggttgggcttcggaatcgttttccgggacgccggctggatgatcctccagcgcggggatctcatgctggagttcttcgcccaccccaacttgtttattgcagcttataatggttacaaataaagcaatagcatcacaaatttcacaaataaagcatttttttcactgcattctagttgtggtttgtccaaactcatcaatgtatcttatcatgtctgtataccgtcgacctctagctagagcttggcgtaatcatggtcatagctgtttcctgtgtgaaattgttatccgctcacaattccacacaacatacgagccggaagcataaagtgtaaagcctggggtgcctaatgagtgagctaactcacattaattgcgttgcgctcactgcccgctttccagtcgggaaacctgtcgtgccagctgcattaatgaatcggccaacgcgcggggagaggcggtttgcgtattgggcgctcttccgcttcctcgctcactgactcgctgcgctcggtcgttcggctgcggcgagcggtatcagctcactcaaaggcggtaatacggttatccacagaatcaggggataacgcaggaaagaacatgtgagcaaaaggccagcaaaaggccaggaaccgtaaaaaggccgcgttgctggcgtttttccataggctccgcccccctgacgagcatcacaaaaatcgacgctcaagtcagaggtggcgaaacccgacaggactataaagataccaggcgtttccccctggaagctccctcgtgcgctctcctgttccgaccctgccgcttaccggatacctgtccgcctttctcccttcgggaagcgtggcgctttctcaatgctcacgctgtaggtatctcagttcggtgtaggtcgttcgctccaagctgggctgtgtgcacgaaccccccgttcagcccgaccgctgcgccttatccggtaactatcgtcttgagtccaacccggtaagacacgacttatcgccactggcagcagccactggtaacaggattagcagagcgaggtatgtaggcggtgctacagagttcttgaagtggtggcctaactacggctacactagaaggacagtatttggtatctgcgctctgctgaagccagttaccttcggaaaaagagttggtagctcttgatccggcaaacaaaccaccgctggtagcggtggtttttttgtttgcaagcagcagattacgcgcagaaaaaaaggatctcaagaagatcctttgatcttttctacggggtctgacgctcagtggaacgaaaactcacgttaagggattttggtcatgagattatcaaaaaggatcttcacctagatccttttaaattaaaaatgaagttttaaatcaatctaaagtatatatgagtaaacttggtctgacagttaccaatgcttaatcagtgaggcacctatctcagcgatctgtctatttcgttcatccatagttgcctgactccccgtcgtgtagataactacgatacgggagggcttaccatctggccccagtgctgcaatgataccgcgagacccacgctcaccggctccagatttatcagcaataaaccagccagccggaagggccgagcgcagaagtggtcctgcaactttatccgcctccatccagtctattaattgttgccgggaagctagagtaagtagttcgccagttaatagtttgcgcaacgttgttgccattgctacaggcatcgtggtgtcacgctcgtcgtttggtatggcttcattcagctccggttcccaacgatcaaggcgagttacatgatcccccatgttgtgcaaaaaagcggttagctccttcggtcctccgatcgttgtcagaagtaagttggccgcagtgttatcactcatggttatggcagcactgcataattctcttactgtcatgccatccgtaagatgcttttctgtgactggtgagtactcaaccaagtcattctgagaatagtgtatgcggcgaccgagttgctcttgcccggcgtcaatacgggataataccgcgccacatagcagaactttaaaagtgctcatcattggaaaacgttcttcggggcgaaaactctcaaggatcttaccgctgttgagatccagttcgatgtaacccactcgtgcacccaactgatcttcagcatcttttactttcaccagcgtttctgggtgagcaaaaacaggaaggcaaaatgccgcaaaaaagggaataagggcgacacggaaatgttgaatactcatactcttcctttttcaatattattgaagcatttatcagggttattgtctcatgagcggatacatatttgaatgtatttagaaaaataaacaaataggggttccgcgcacatttccccgaaaagtgccacctgacgtcgacggatcgggagatctcccgatcccctatggtcgactctcagtacaatctgctctgatgccgcatagttaagccagtatctgctccctgcttgtgtgttggaggtcgctgagtagtgcgcgagcaaaatttaagctacaacaaggcaaggcttgaccgacaattgcatgaagaatctgcttagggttaggcgttttgcgctgcttcgcgatgtacgggccagatatacgcgttgacattgattattgactagttattaatagtaatcaattacggggtcattagttcatagcccatatatggagttccgcgttacataacttacggtaaatggcccgcctggctgaccgcccaacgacccccgcccattgacgtcaataatgacgtatgttcccatagtaacgccaatagggactttccattgacgtcaatgggtggagtatttacggtaaactgcccacttggcagtacatcaagtgtatcatatgccaagtacgccccctattgacgtcaatgacggtaaatggcccgcctggcattatgcccagtacatgaccttatgggactttcctacttggcagtacatctacgtattagtcatcgctattaccatggtgatgcggttttggcagtacatcaatgggcgtggatagcggtttgactcacggggatttccaagtctccaccccattgacgtcaatgggagtttgttttggcaccaaaatcaacgggactttccaaaatgtcgtaacaactccgccccattgacgcaaatgggcggtaggcgtgtacggtgggaggtctatataagcagagctcgtttagtgaaccgtcagatcgcctggagacgccatccacgctgttttgacctccatagaagacaccgggaccgatccagcctccggactctagaggatcgaaccctt

SEQ ID NO: 39 - DNA, 40556 bp, Artificial Sequence
  pMR10Y_COVAX191_delN
atgaatcggacgtttgaccggaaggcatacaggcaagaactgatcgacgcggggttttccgccgaggatgccgaaaccatcgcaagccgcaccgtcatgcgtgcgccccgcgaaaccttccagtccgtcggctcgatggtccagcaagctacggccaagatcgagcgcgacagcgtgcaactggctccccctgccctgcccgcgccatcggccgccgtggagcgttcgcgtcgtctcgaacaggaggcggcaggtttggcgaagtcgatgaccatcgacacgcgaggaactatgacgaccaagaagcgaaaaaccgccggcgaggacctggcaaaacaggtcagcgaggccaagcaggccgcgttgctgaaacacacgaagcagcagatcaaggaaatgcagctttccttgttcgatattgcgccgtggccggacacgatgcgagcgatgccaaacgacacggcccgctctgccctgttcaccacgcgcaacaagaaaatcccgcgcgaggcgctgcaaaacaaggtcattttccacgtcaacaaggacgtgaagatcacctacaccggcgtcgagctgcgggccgacgatgacgaactggtgtggcagcaggtgttggagtacgcgaagcgcacccctatcggcgagccgatcaccttcacgttctacgagctttgccaggacctgggctggtcgatcaatggccggtattacacgaaggccgaggaatgcctgtcgcgcctacaggcgacggcgatgggcttcacgtccgaccgcgttgggcacctggaatcggtgtcgctgctgcaccgcttccgcgtcctggaccgtggcaagaaaacgtcccgttgccaggtcctgatcgacgaggaaatcgtcgtgctgtttgctggcgaccactacacgaaattcatatgggagaagtaccgcaagctgtcgccgacggcccgacggatgttcgactatttcagctcgcaccgggagccgtacccgctcaagctggaaaccttccgcctcatgtgcggatcggattccacccgcgtgaagaagtggcgcgagcaggtcggcgaagcctgcgaagagttgcgaggcagcggcctggtggaacacgcctgggtcaatgatgacctggtgcattgcaaacgctagggccttgtggggtcagttccggctgggggttcagcagccactcgatcgaggtcccaatacgcaaaccgcctctccccgcgcgttggccgattcattaatgcagctggcacgacaggtttcccgactggaaagcgggcagtgagcgcaacgcaattaatgtgagttagctcactcattaggcaccccaggctttacactttatgcttccggctcgtatgttgtgtggaattgtgagcggataacaatttcacacaggaaacagctatgaccatgattacgccaagcttccatgggatatcgagatctcctgcagagctctagagtcgagactagtctcgacgggcccggtaccccctcgagggggccgcacttaagttacgcgtggatcgtggagctttcgggttttaactataacggtcctaaggtagcgaactcgggtcttgccttaatcccaacaaccggattatctacacggatttcaatagctgatatagcgaatcaccgagattaattaataatacgactcactatagtataagagtgattggcgtccgtacgtaccctctcaactctaaaactcttgtagtttaaatctaatctaaactttataaacggcacttcctgcgtgtccatgcccgcgggcctggtcttgtcatagtgctgacatttgtagttccttgactttcgttctctgccagtgacgtgtccattcggcgccagcagcccacccataggttgcataatggcaaagatgggcaaatacggcctgggcttcaaatgggccccagaatttccatggatgcttccgaacgcatcggagaagttgggtaaccctgagaggtcagaggaggatgggttttgcccctctgctgcgcaagaaccgaaagttaaaggaaaaactttggttaatcacgtgagggtgaattgtagccggcttccagctttggaatgctgtgttcagtctgccataatccgtgatatttttgtagatgaggatccccagaaggtggaggcctcaactatgatggcattgcagttcggtagtgccgtcttggttaagccatccaagcgcttgtctattcaggcatggactaatttgggtgtgcttcccaaaacagctgccatggggttgttcaagcgcgtctgcctgtgtaacaccagggagtgctcttgtgacgcccacgtggcctttcacctttttacggtccaacccgatggtgtatgcctgggtaatggccgttttataggctggttcgttccagtcacagccataccggagtatgcgaagcagtggttgcaaccctggtccatccttcttcgtaagggtggtaacaaagggtctgtgacatccggccacttccgccgcgctgttaccatgcctgtgtatgactttaatgtagaggatgcttgtgaggaggttcatcttaacccgaagggtaagtactcctgcaaggcgtatgccctgctgaagggctatcgcggtgttaagcccatcctgtttgtggaccagtatggttgcgactatactggatgtctcgccaagggtcttgaggactatggcgatctcaccttgagtgagatgaaggagttgttccctgtgtggcgtgactccttggatagtgaagtccttgtggcttggcacgttgatcgagatcctcgggctgctatgcgtctgcagactcttgctactgtacgttgcattgattatgtgggccaaccgaccgaggatgtggtggatggagatgtggtagtgcgtgagcctgctcatcttctcgcagccaatgccattgttaaaagactcccccgtttggtggagactatgctgtatacggattcgtccgttacagaattctgttataaaaccaagctgtgtgaatgcggttttatcacgcagtttggctatgtggattgttgtggtgacacctgtgattttcgtgggtgggttgccggcaatatgatggatggctttccatgtccagggtgtaccaaaaattatatgccctgggaattggaggcccagtcatcaggtgttataccagaaggaggtgttctattcactcagagcactgatacagtgaatcgtgagtcctttaagctctacggtcatgctgttgtgccttttggttctgctgtgtattggagcccttgcccaggtatgtggcttccagtaatttggtcgtcggttaagtcatactctggtttgacttatacaggagtagttggttgtaaggcaattgttcaagagacagacgctatatgtcgttctctgtatatggattatgtccagcacaagtgtggcaatctcgagcagagagctatccttggattggacgatgtctatcatagacagttgcttgtgaataggggtgactatagtctcctccttgagaatgtggatttgtttgttaagcggcgcgctgaatttgcttgcaaattcgccacctgtggagatggtcttgtacccctcctactagatggtttagtgccccgcagttattatttgattaagagtggtcaagctttcacctctatgatggttaattttagccatgaggtgactgacatgtgtatggacatggctttattgttcatgcatgatgttaaagtggccactaagtatgttaagaaggttactggcaaactggccgtgcgctttaaagcgttgggtgtagccgttgtcagaaaaattactgaatggtttgatttagccgtggacattgctgctagtgccgctggatggctttgctaccagctggtaaatggcttatttgcagtggccaatggtgttataacctttgtacaggaggtgcctgagcttgtcaagaattttgttgacaagttcaaggcatttttcaaggttttgatcgactctatgtcggtttctatcttgtctggacttactgttgtcaagactgcctcaaatagggtgtgtcttgctggcagtaaggtttatgaagttgtgcagaaatctttgtctgcatatgttatgcctgtgggttgcagcgaagccacttgtttggtgggtgagattgaacctgcagtttttgaagatgatgttgttgatgtggttaaagccccattaacatatcaaggctgttgtaagccacccacttctttcgagaagatttgtattgtggataaattgtatatggccaagtgtggtgatcaattttaccctgtggttgttgataacgacactgttggcgtgttagatcagtgctggaggtttccctgtgcgggcaagaaagtcgagtttaacgacaagcccaaagtcaggaagataccctccacccgtaagattaagatcaccttcgcactggatgcgacctttgatagtgttctttcgaaggcgtgttcagagtttgaagttgataaagatgttacattggatgagctgcttgatgttgtgcttgacgcagttgagagtacgctcagcccttgtaaggagcatgatgtgataggcacaaaagtttgtgctttacttgataggttggcaggagattatgtctatctttttgatgagggaggcgatgaagtgatcgccccgaggatgtattgttccttttctgctcctgatgacgaggactgcgttgcagcggatgttgtagatgcagatgaaaaccaagatgatgatgccgaggactcagcagtccttgtcgctgatacccaagaagaggacggcgttgccaaggggcaggttgaggcggattcggaaatttgcgttgcgcatactggtagtcaagaagaattggctgagcctgatgctgtcggatctcaaactcccatcgcctctgctgaggaaaccgaagtcggagaggcaagcgacagggaagggattgctgaggcgaaggcaactgtgtgtgctgatgctgtagatgcctgccccgatcaagtggaggcatttgaaattgaaaaggtcgaggactctatcttggatgagcttcaaactgaacttaatgcgccagcggacaagacctatgaggatgtcttggcattcgatgccgtatgctcagaggcgttgtctgcattctatgctgtgccgagtgatgagacgcactttaaagtgtgtggattctattcgcctgctatagagcgcactaattgttggctgcgttctactttgatagtaatgcagagtctacctttggaatttaaagacttggagatgcaaaagctctggttgtcttacaaggccggctatgaccaatgctttgtggacaaactagttaagagcgtgcccaagtctattatccttccacaaggtggttatgtggcagattttgcctatttctttctaagccagtgtagctttaaagcttatgctaactggcgttgtttagagtgtgacatggagttaaagcttcaaggcttggacgccatgtttttctatggggacgttgtgtctcatatgtgcaagtgtggtaatagcatgaccttgttgtctgcagatataccctacactttgcattttggagtgcgagatgataagttttgcgctttttacacgccaagaaaggtctttagggctgcttgtgcggtagatgttaatgattgtcactctatggctgtagtagagggcaagcaaattgatggtaaagtggttaccaaatttattggtgacaaatttgattttatggtgggttacgggatgacatttagtatgtctccttttgaactcgcccagttatatggttcatgtataacaccaaatgtttgttttgttaaaggagatgttataaaggttgttcgcttagttaatgctgaagtcattgttaaccctgctaatgggcgtatggctcatggtgccggcgtcgccggcgccatagctgaaaaggcgggcagtgcttttattaaagaaacctccgatatggtgaaggctcagggcgtttgccaggttggtgaatgctatgaatctgccggtggtaagttatgtaaaaaggtgcttaacattgtagggccagatgcgcgagggcatggcaagcaatgctattcacttttagagcgtgcttatcagcatattaataagtgtgacaatgttgtcactactttaatttcggctggtatatttagtgtgcctactgatgtctccctaacttacttacttggtgtagtgacaaagaatgtcattcttgtcagtaacaaccaggatgattttgatgtgatagagaagtgtcaggtgacctccgttgctggtaccaaagcgctatcacttcaattggccaaaaatttgtgccgtgatgtaaagtttgtgacgaatgcatgtagttcgctttttagtgaatcttgctttgtctcaagctatgatgtgttgcaggaagttgaagcgctgcgacatgatatacaattggatgatgatgctcgtgtctttgtgcaggctaatatggactgtctgcccacagactggcgtctcgttaacaaatttgatagtgttgatggtgttagaaccattaagtattttgaatgcccgggcgggatttttgtatccagccagggcaaaaagtttggttatgttcagaatggttcatttaaggaggcgagtgttagccaaataagggctttactcgctaataaggttgatgtcttgtgtactgttgatggtgttaacttccgctcctgctgcgtagcagagggtgaagtttttggcaagacattaggttcagtcttttgtgatggcataaatgtcaccaaagttaggtgtagtgccatttacaagggtaaggttttctttcagtacagtgatttgtccgaggcagatcttgtggctgttaaagatgcctttggttttgatgaaccacaactgctgaagtactacactatgcttggcatgtgtaagtggccagtagttgtttgtggcaattattttgctttcaagcagtcaaataataattgctacatcaacgtggcatgtttaatgctgcaacacttgagtttaaagtttcctaagtggcaatggcaagaggcttggaacgagttccgctctggtaaaccactaaggtttgtgtccttggtattagcaaagggcagctttaaatttaatgaaccttctgattctatcgattttatgcgtgtggtgctacgtgaagcagatttgagtggtgccacgtgcaatttggaatttgtttgtaaatgtggtgtgaagcaagagcagcgcaaaggtgttgacgctgttatgcattttggtacgttggataaaggtgatcttgtcaggggttataatatcgcatgtacgtgcggtagtaaacttgtgcattgcacccaatttaacgtaccatttttaatttgctccaacacaccagagggtaggaaactgcccgacgatgttgttgcagctaatatttttactggtggtagtgtgggccattacacgcatgtgaaatgtaaacccaagtaccagctttatgatgcttgtaatgttaataaggtttcggaggctaagggtaattttaccgattgcctctaccttaaaaatttaaagcaaaccttctcgtctgtgctgacgactttttatttagatgacgtaaagtgtgtggagtataagccagatttatcgcagtattactgtgagtctggtaaatattatacaaaacccattattaaggcccaatttagaacatttgagaaggttgatggtgtctataccaactttaaattggtgggacatagtattgctgaaaaactcaatgctaagctgggatttgattgtaattctccctttgtggagtataaaattacagagtggccaacagctactggagatgtggtgttggctagtgatgatttgtatgtaagtcggtacttaagcgggtgcattacttttggtaaaccggttgtctggcttggccatgaggaagcatcgctgaaatctctcacatattttaatagacctagtgtcgtttgtgaaaataaatttaacgtgttgcccgttgatgtcagtgaacccacggacaaggggcctgtgcctgctgcagtccttgttaccggcgtccctggagctgatgcgtcagctggtgccggtattgccaaggagcaaaaagcctgtgcttctgctagtgtggaggatcaggttgttacggaggttcgtcaagagccatctgtttcagctgctgatgtcaaagaggttaaattgaatggtgttaaaaagcctgttaaggtggaaggtagtgtggttgttaatgatcccactagcgaaaccaaagttgttaaaagtttgtctattgttgatgtctatgatatgttcctgacagggtgtaagtatgtggtttggactgctaatgagttgtctcgactagtaaattcaccgactgttagggagtatgtgaagtggggtatgggaaagattgtaacacccgctaagttgttgttgttaagagatgagaagcaagagttcgtagcgccaaaagtagtcaaggcgaaagctattgcctgctattgtgctgtgaagtggtttctcctctattgttttagttggataaagtttaatactgacaataaggttatatacaccacagaagtagcttcaaagcttactttcaagttgtgctgtttggcctttaagaatgccttacagacgtttaattggagcgttgtgtctaggggctttttcctagttgcaacggtctttttactctggtttaactttttgtatgctaatgttattttgagtgacttctatttgcctaatattgggcctctccctacgtttgtgggacagatagttgcgtggtttaagactacatttggtgtgtcaaccatctgtgatttctaccaggtgacggatttgggctatagaagttcgttttgtaatggaagtatggtatgtgaactatgcttctcaggttttgatatgctggacaactatgatgctataaatgttgttcaacacgttgtagataggcgtttgtcctttgactatattagcctatttaaactggtagttgagcttgtaatcggctactctctttatactgtgtgcttctacccactgtttgtccttattggaatgcagttattgaccacatggttgcctgaattctttatgctggagactatgcattggagtgctcgtttgtttgtgtttgttgccaatatgcttccagcttttacgttactgcgattttacatcgtggtgacagctatgtataaggtctattgtctttgtagacatgttatgtatggatgtagtaagcctggttgcttgttttgttataagagaaaccgtagtgtccgtgttaagtgtagcaccgttgttggtggttcactacgctattacgatgtaatggctaacggcggcacaggtttctgtacaaagcaccagtggaactgtcttaattgcaattcctggaaaccaggcaatacattcataactcatgaagcagcggcggacctctctaaggagttgaaacgccctgtgaatccaacagattctgcttattactcggtcacagaggttaagcaggttggttgttccatgcgtttgttctacgagagagatggacagcgtgtttatgatgatgttaatgctagtttgtttgtggacatgaatggtctgctgcattctaaagttaaaggtgtgcctgaaacgcatgttgtggttgttgagaatgaagctgataaagctggttttctcggcgccgcagtgttttatgcacaatcgctctacagacctatgttgatggtggaaaagaaattaataactaccgccaacactggtttgtctgttagtcgaactatgtttgacctttatgtagattcattgctgaacgtcctcgacgtggatcgcaagagtctaacaagttttgtaaatgctgcgcacaactctctaaaggagggtgttcagcttgaacaagttatggatacctttattggctgtgcccgacgtaagtgtgctatagattctgatgttgaaaccaagtctattaccaagtccgtcatgtcggcagtaaatgctggcgttgattttacggatgagagttgtaataacttggtgcctacctatgttaaaagtgacactatcgttgcagccgatttgggtgttcttattcagaataatgctaagcatgtacaggctaatgttgctaaagccgctaatgtggcttgcatttggtctgtggatgcttttaaccagctatctgctgacttacagcataggctgcgaaaagcatgttcaaaaactggcttgaagattaagcttacttataataagcaggaggcaaatgttcctattttaactacaccgttctctcttaaagggggcgctgtttttagtagaatgttacaatggttgtttgttgctaatttgatttgtttcattgtgttgtgggcccttatgccaacatatgcagtgcacaaatcggatatgcagttgcctttatatgccagttttaaagttatagataacggtgtgctaagggatgtgtctgttactgacgcatgcttcgcaaacaaatttaatcaattcgaccaatggtatgagtctacttttggtcttgcttattaccgcaactctaaggcttgtcctgttgtggttgctgtaatagatcaagacattggccataccttatttaatgttcctaccacagttttaagatatggatttcatgtgttgcattttataacccatgcatttgctactgatagcgtgcagtgttacacgccacatatgcaaatcccctatgataatttctatgctagtggttgcgtgttgtcatccctctgtactatgcttgcgcatgcagatggaaccccgcatccttattgttatacagggggtgttatgcataatgcctctctgtatagttctttggctcctcatgtccgttataacctggctagttcaaatggttatatacgttttcccgaagtggttagtgaaggcattgtgcgtgttgtgcgcactcgctctatgacctactgcagggttggtttatgtgaggaggccgaggagggtatctgctttaattttaatcgttcatgggtattgaacaacccgtattatagggccatgcctggaactttttgtggtaggaatgcttttgatttaatacatcaagttttaggaggattagtgcggcctattgatttctttgccttaacggcgagttcagtggctggtgctatccttgcaattattgtcgttttggctttctattatttaatcaagcttaagcgtgcctttggtgactacactagtgttgtggttatcaatgtaattgtgtggtgtataaattttctgatgctttttgtgtttcaggtttatcccacattgtcttgtttatatgcttgtttctacttctacaccacgctttatttcccttcggagataagtgttgttatgcatttgcaatggcttgtcatgtatggtgctattatgcccttgtggttttgcattatttacgtggcagtcgttgtttcaaaccatgcattgtggttgttctcttactgccgcaaaattggtaccgaggttcgtagtgacggcacatttgaggaaatggcccttactacctttatgattactaaagaatcttattgtaagttgaaaaactctgtttctgatgttgcttttaacaggtacttgagtctttacaacaagtaccgttacttcagtggcaaaatggatactgccgcttatagagaggctgcctgttcacaactggcaaaggcaatggaaacatttaaccataataatggtaatgatgttctctatcagcctccaaccgcctctgttactacatcatttttacagtctggtatagtgaagatggtgtcgcccacctctaaagtggagccttgtattgttagtgttacttatggtaacatgacacttaatgggttgtggttggatgataaagtttattgcccaagacatgttatctgttcttcagctgacatgacagaccctgattatcctaatttgctttgtagagtgacatcaagtgatttttgtgttatgtctggtcgtatgagccttactgtaatgtcttatcaaatgcagggctgccaacttgttttgactgttacactgcaaaatcctaacacgcctaagtattccttcggtgttgttaagcctggtgagacatttactgtactggctgcatacaatggcagacctcaaggagccttccatgttacgcttcgtagtagccataccataaagggctcctttctatgtggatcctgcggttctgtaggatatgttttaactggcgatagtgtacgatttgtttatatgcatcagctagagttgagtactggttgtcataccggtactgactttagtgggaacttttatggtccctatagagatgcgcaagttgtacaattgcctgttcaggattatacgcagactgttaatgttgtagcttggctttatgctgctatttttaacagatgcaactggtttgtgcaaagtgatagttgttccctggaggagtttaatgtttgggctatgaccaatggttttagctcaatcaaagccgatcttgtcttggatgcgcttgcttctatgacaggcgttacagttgaacaggtgttggccgctattaagaggctgcattctggattccagggcaaacaaattttaggtagttgtgtgcttgaagatgagctgacaccaagtgatgtttatcaacaactagctggtgtcaagctacagtcaaagcgcacaagagttataaaaggtacatgttgctggatattggcttcaacgtttttgttctgtagcattatctcagcatttgtaaaatggactatgtttatgtatgttactacccatatgttgggagtgacattgtgtgcactttgttttgtaagctttgctatgttgttgatcaagcataagcatttgtatttaactatgtacatcatgcctgtgttatgcacactgttttacaccaactatttggttgtgtacaaacagagttttagaggtctagcttatgcttggctttcacactttgtccctgctgtagattatacatatatggatgaagttttatatggtgttgtgttgctagtagctatggtgtttgttaccatgcgtagcataaaccacgacgtcttttctattatgttcttggttggtagacttgtcagcctggtatccatgtggtattttggagccaatttagaggaagaggtactattgttcctcacatccctatttggcacgtacacatggactactatgttgtcattggctaccgctaaggttattgctaaatggttggctgtgaatgtcttgtacttcacagacgtaccgcaaattaaattagttctgttgagctacttgtgtattggttatgtgtgttgttgttattggggaatcttgtcactccttaatagcatttttaggatgccattgggcgtctacaattataaaatctccgttcaggagttacgttatatgaatgctaatggcttgcgcccacctagaaatagttttgaggccctgatgcttaattttaagctgttgggaattggtggtgtgccagtcattgaagtatctcaaattcaatcaagattgacggatgttaaatgtgctaatgttgtgttgcttaattgcctccagcacttgcatattgcatctaattctaagttgtggcagtattgtagtactttgcacaatgaaatactggctacatctgatttgagcgtggccttcgataagttggctcaactcttagttgttttatttgctaatccagcagcagtggatagcaagtgccttgcaagtattgaagaagtgagcgatgattacgttcgcgacaatactgtcttgcaagccttacagagtgaatttgttaatatggctagcttcgttgagtatgaacttgctaagaagaatctagatgaggctaaggctagcggctctgccaatcaacagcagattaagcagctagagaaggcgtgtaatattgctaagtcagcatatgagcgcgacagagctgttgctcgtaagctggaacgtatggctgatttagctcttacaaacatgtataaagaagctagaattaatgataagaagagtaaggtagtgtctgcattgcaaaccatgctctttagtatggtgcgtaagctagataaccaagctcttaattctattttagacaacgcagttaagggttgtgtacctttgaatgcaataccatcattgacttcgaacactctgactataatagtgccagataagcaggtttttgatcaggttgtggataatgtgtatgtcacctatgctgggaatgtatggcatatacagtttattcaagatgctgatggtgctgttaaacaattgaatgagatagatgttaattcaacctggcctctagtcattgctgcaaataggcataatgaagtgtctactgttgttttgcagaacaatgagttgatgcctcagaagttgagaactcaggttgtcaatagtggctcagatatgaattgtaatactcctacccagtgttactataatactactggcacgggtaagattgtgtatgctatacttagtgactgtgacggcctgaagtacactaagatagtaaaagaagatggaaattgtgttgttttggaattggatcctccctgtaagttttctgttcaggatgtgaagggccttaaaattaagtacctttactttgtgaaggggtgtaatacactggctagaggctgggttgtaggcaccttatcctcgacagtgagattgcaggcgggtacggcaactgagtatgcctccaactctgcaatactgtcgctgtgtgcgttttctgtagatcctaagaaaacgtacttggattatataaaacagggtggagttcccgttactaattgtgttaagatgttatgtgaccatgctggcactggtatggccattactattaagccggaggcaaccactaatcaggattcttatggtggtgcttccgtttgtatatattgccgctcgcgtgttgaacatccagatgttgatggattgtgcaaattacgcggcaagtttgtccaagtgcccttaggcataaaagatcctgtgtcatatgtgttgacgcatgatgtttgtcaggtttgtggcttttggcgagatggtagctgttcctgtgtaggcacaggctcccagtttcagtcaaaagacacgaactttttaaacggattcggggtacaagtgtaaatgcccgtcttgtaccctgtgccagtggcttggacactgatgttcaattaagggcatttgacatttgtaatgctaatcgagctggcattggtttgtattataaagtgaattgctgccgcttccagcgtgtagatgaggacggcaacaagttggataagttctttgttgttaaaagaactaatttagaagtgtataacaaggagaaagaatgctatgagttgacaaaagaatgcggtgttgtggctgaacacgagttcttcacatttgatgtggagggaagtcgggtaccacacatagtccgtaaagatctttcaaagtttactatgttagatctttgctatgcattgcgtcattttgaccgcaatgattgttcaactcttaaggaaattctccttacatatgctgagtgtgaagagtcctacttccaaaagaaggactggtatgattttgttgagaatcctgatataattaatgtgtacaagaagcttggtcctatatttaatagagccctgcttaacactgccaagtttgcagacgcattagtggaggcaggcttagtaggtgttttaacacttgataatcaagatttatatggtcaatggtatgactttggagattttgtcaagacagtacctggttgtggtgttgccgtggcagactcttattattcatatatgatgccaatgctgactatgtgtcatgcgttggatagtgagttgtttgttaatggtacttatagggagtttgaccttgttcagtatgattttactgatttcaagctagagctgttcactaagtattttaagcattggagtatgacctaccacccgaacacctgtgagtgcgaggatgacaggtgcattattcattgcgccaattttaatatacttttcagcatggtcttacctaagacctgttttgggcctcttgttaggcagatatttgtggatggtgttcctttcgttgtgtcgatcggttaccattataaagaattaggtgttgttatgaatatggatgtggatacacatcgttatcgcttgtctcttaaggacttgcttttgtatgctgcagaccctgcccttcatgtggcgtctgctagtgcactgcttgatttgcgcacatgttgttttagcgttgcagctattacaagtggcgtaaaatttcaaacagttaaacctggaaattttaatcaggatttctacgagtttattttgagtaaaggcctgcttaaagaggggagctccgttgatttgaagcacttcttctttacgcaggatggtaatgctgctattactgattacaattactacaagtataatctacccaccatggtggatattaagcagttgttgtttgttttagaagttgttaataagtacttcgagatctatgagggtgggtgtatacccgcaacacaggtcattgttaataattatgacaagagtgctggctatccatttaataaatttggaaaggccaggctctattatgaggcattatcatttgaggagcaggatgaaatttatgcgtataccaaacgcaatgtcctgccgaccctaactcaaatgaatcttaaatatgctattagtgctaagaatagggcccgcaccgttgctggtgtctctattctcagtactatgactggcagaatgtttcatcaaaagtgtctaaagagtatagcagctactcgcggtgttcctgtagttataggcaccacgaagttctatggcggttgggatgatatgttacgccgccttattaaagatgttgatagtcctgtactcatgggttgggactatcctaaatgtgatcgtgctatgccaaacatactgcgtattgttagtagtttggtgctagcccgtaaacatgattcgtgctgttcgcatacggatagattctatcgtcttgcgaacgagtgcgcccaagttttgagtgaaattgttatgtgtggtggttgttattatgttaaaccaggtggcactagtagtggggatgcaaccactgcttttgctaattctgtgtttaacatttgtcaagctgtttccgccaatgtatgctcgcttatggcatgcaatggacacaaaattgaagatttgagtatacgcgagttacaaaagcgcctatactctaatgtctatcgtgcggaccatgttgaccccgcatttgttagtgagtattatgagtttttaaacaagcattttagtatgatgattttgagtgatgatggtgttgtgtgttataattcagagtttgcgtccaagggttatattgctaatataagtgcctttcaacaggtattatattatcaaaacaacgtgtttatgtctgaggccaaatgttgggtagaaacagacatcgaaaagggaccgcatgaattttgttctcaacatacaatgctagtcaagatggatggtgatgaagtctaccttccataccctgatccttcgagaatcttaggagcaggctgttttgttgatgatttactcaagactgatagcgttctcttgatagagcgtttcgtaagtcttgcaattgatgcttatcctttagtataccatgagaacccagagtatcaaaatgtgttccgggtatatttagaatacatcaagaagctgtacaatgatctcggtaatcagatcctggacagctacagtgttattttaagtacttgtgatggtcaaaagtttactgacgagacgttttacaagaacatgtatttaagaagtgcagtgctgcaaagcgttggtgcctgcgttgtctgtagttctcaaacatcattacgttgtggcagttgcatacgcaagcctttgctgtgttgcaaatgcgcctatgatcatgttatgtccactgatcataaatatgtcctgagtgtgtcaccatatgtgtgtaattcaccgggatgtgatgtaaatgatgttaccaaattgtatttaggtggtatgtcatattattgtgaggaccataaaccacagtattcattcaaattggtgatgaatggtatggtttttggtttatataagcagtcttgtactggttcgccctacatagaggattttaataaaatcgctagttgcaaatggacagaagtcgatgattatgtgctagctaatgaatgcaccgaacgccttaaattgtttgccgcagaaacgcagaaggccacagaagaggcctttaagcaatgttatgcgtcagcaacgatccgtgagatcgtgagcgatcgggagttaattttatcttgggaaattggtaaagtccgcccgccacttaataaaaattacgtgttcaccggctaccattttactaataatggtaagacagttttaggtgagtatgtttttgataagagtgagttgactaatggtgtgtattatcgcgccacaaccacttataagttatctgtaggtgatgtgttcattttaacatcacacgcagtgtctagtttaagtgctcctacattagtaccgcaggagaattatactagcattcgttttgctagtgtttatagtgtgcctgagacgtttcagaataatgtgcctaattatcagcacattggaatgaagcgctattgtactgtacagggaccgcctggtactggtaagtcccatctagccattgggctagctgtttattattgtacagcgcgcgtggtgtataccgctgctagccatgctgcagttgacgcgctgtgtgaaaaggcacataaatttctcaacatcaacgactgcacgcgtattgttcctgcaaaggtgcgtgtagattgttatgataaattcaaggtcaatgacaccactcgcaagtatgtgtttactacaataaatgcattacctgagttggtgactgacattattgtcgttgatgaagttagtatgcttaccaactatgagctgtctgttattaacagtcgtgttagggctaagcattatgtgtatattggcgacccggcgcagttacctgcaccacgtgtgctactgaataagggaactctagaacctagatattttaattccgttaccaagctaatgtgttgtttgggtccagatattttcttgggcacctgttatagatgccctaaggagattgtggatacggtgtcagccttggtttataataataagctgaaggctaaaaatgataatagctccatgtgctttaaggtttattataagggccagactacacatgagagttctagtgctgttaatatgcagcaaatacatttaatttccaagtttctgaaggcaaaccccagttggagtaacgccgtatttattagtccttataactcgcagaactatgttgctaagagagtcttgggattacaaacccagacagtagactcagcgcagggttctgaatatgattttgttatctactcacagactgcggaaacagcgcattctgtcaatgtaaatagattcaatgttgctattacacgtgctaagaagggtattctctgtgtcatgagtagtatgcaattatttgagtctcttaattttactacactgacgttggataagattaacaatccacgattacagtgtactacaaatttgtttaaggattgtagcaggagctatgtaggatatcacccagcccatgcaccatcctttttggcagttgatgacaaatataaggtaggcggtgatttagccgtttgccttaatgttgctgattctgctgtcacttattcgcggcttatatcactcatgggattcaagcttgacttgacccttgatggttattgtaagctgtttataactagagatgaagctatcaaacgtgttagagcctgggttggcttcgatgcagaaggtgcccatgcgatacgtgatagcattgggacaaatttcccattacaattaggcttttcgactggaattgattttgttgtcgaagccactggaatgtttgctgagagagatggttatgtctttaaaaaggcagccgcacgagctcctcctggcgaacaatttaaacaccttatcccacttatgtcaagagggcagaaatgggatgtggttcgcattagaatagtacaaatgttgtcagaccacctagtggatttggcagacagtgttgtacttgtgacgtgggctgccagctttgagctcacatgtttgcgatatttcgctaaagttggaagagaagttgtgtgtagtgtctgcaccaagcgtgcgacatgttttaattctagaactggatactatggatgctggcgacatagttattcctgtgattacctgtacaacccactaatagttgacattcaacagtggggatatacaggatctttaactagcaatcatgatcctatttgcagcgtgcataagggtgctcatgttgcatcatctgatgctatcatgacccggtgtctagctgttcatgattgcttttgtaagtctgttaattggaatttagaataccccattatttcaaatgaggtcagtgttaatacctcctgcaggttattgcagcgcgtaatgtttagggctgcgatgctatgcaataggtatgatgtgtgttatgacattggcaaccctaaaggtcttgcctgtgtcaaaggatatgattttaagttctatgacgcctcccctgttgttaagtctgttaaacagtttgtttacaaatacgaggcacataaagatcaatttttagatggtttgtgtatgttttggaactgcaatgtggataagtatccagcgaatgcagttgtgtgtaggtttgacacgcgtgtgttgaacaaattaaatctccctggctgtaatggtggcagtttgtatgttaacaaacatgcattccacaccagtccctttacccgggctgccttcgagaatttgaagcctatgcctttcttttattattcagatacgccctgtgtgtatatggaaggcatggaatctaagcaggtcgattatgtcccattgagaagcgctacatgcatcacaagatgcaatttaggtggcgctgtttgtttaaaacatgctgaggagtatcgtgagtaccttgagtcttacaatacggcaaccacagcgggttttactttttgggtctataagacttttgatttttacaacctttggaatacttttactaggctccaaagtttagaaaatgtagtgtataacctggtcaacgctggacactttgatggccgggcgggtgaactgccttgtgctgttataggtgagaaagtcattgccaagattcaaaatgaggatgtcgtggtctttaaaaataacacgccattccccactaatgtggctgtcgaattatttgctaagcgcagtattcggccccaccccgagcttaagctctttagaaatttgaatattgacgtgtgctggagtcacgtcctttgggattatgctaaggatagtgtgttttgcagttcgacgtataaggtctgcaaatacacagatttacagtgcattgaaagcttgaatgtactttttgatggtcgtgataatggtgctcttgaagcttttaagaagtgccggaatggcgtctacattaacacgacaaaaattaaaagtctgtcgatgattaaaggcccacaacgtgccgatttgaatggcgtagttgtggagaaagttggagattctgatgtggaattttggtttgctgtgcgtaaagacggtgacgatgttatcttcagccgtacagggagccttgaaccgagccattaccggagcccacaaggtaatccgggtggtaatcgcgtgggtgatctcagcggtaatgaagctctagcgcgtggcactatctttactcaaagcagattattatcttctttcacacctcgatcagagatggagaaagattttatggatttagatgatgatgtgttcattgcaaaatatagtttacaggactacgcgtttgaacacgttgtttatggtagttttaaccagaagattattggaggtttgcatttgcttattggcttagcccgtaggcagcaaaaatccaatctggtaattcaagagttcgtgacatacgactctagcattcattcgtactttatcactgacgagaacagtggtagtagtaagagtgtgtgcactgttattgatttattgttagatgattttgtggacattgtaaagtccctgaatctaaagtgtgtgagtaaggttgttaatgttaatgtggattttaaggacttccagtttatgttgtggtgcaatgaggagaaggtcatgactttctatcctcgtttgcaggctgctgctgactggaaacctggttatgttatgcctgtcttatataagtatttggaatcgcctctggaaagagtaaacctctggaattatggcaagccgattactttacctacaggatgtatgatgaatgttgctaagtatactcaattatgtcaatatttgagcactacaacattagcagttccggctaatatgcgtgtcttacaccttggtgccggttcggataagggtgttgcccctgggtctgcagttcttaggcagtggctaccagcgggaagtattcttgtagataatgatgtgaatccatttgtgagtgacagtgtcgcctcatattatggaaattgtataaccttaccctttgattgtcagtgggatctgataatttctgatatgtacgaccctcttactaagaacattggggagtacaacgtgagtaaagatggattctttacttacctctgtcatttaattcgtgacaagttggctctgggtggcagtgttgccataaaaataacagagttttcttggaacgctgagttatatagtttaatggggaagtttgcgttctggacaatcttttgcaccaacgtaaacgcctcttcaagtgaaggatttttgattggcataaattggttgaataagacccgtaccgaaattgacggtaaaaccatgcatgccaattatctgttttggagaaatagtacaatgtggaatggaggggcttacagtctctttgacatgagtaagttccctttgaaagcggctggtacggctgttgttagccttaaaccagaccaaataaatgacttagtcctctccttgattgagaagggcaagttattagtgcgtgatacacgcaaagaagtttttgttggcgatagcctagtaaatgtcaaataaatctatacttgtcgtggctgtgaaaatggcctttgctgacaagcctaatcatttcataaactttcccctggcccaatttagtggctttatgggtaagtatttaaagctacagtctcaacttgtggaaatgggtttagactgtaaattacagaaggcaccacatgttagtattaccctgcttgatattaaagcagaccaatacaaacaggtggaatttgcaatacaagaaataatagatgatctggcggcatatgagggagatattgtctttgacaaccctcacatgcttggcagatgccttgttcttgatgttagaggatttgaagagttgcatgaagatattgttgaaattctccgcagaaggggttgcacggcagatcaatccagacactggattccgcactgcactgtggcccaatttgacgaagaaagagaaacaaaaggaatgcaattctatcataaagaacccttctacctcaagcataacaacctattaacggatgctgggcttgagctcgtgaagataggttcttccaaaatagatgggttttattgtagtgaactgagtgtttggtgtggtgagaggctttgttataagcctccaacacccaaattcagtgatatatttggctattgctgcatagataaaatacgtggtgatttagaaataggcgacctgccgcaggatgatgaggaagcgtgggccgagctaagttaccactatcaaagaaacacctacttcttcagacatgtgcacgataatagcatctattttcgtaccgtgtgtagaatgaagggttgtatgtgttgatttgtttttacactattagtgtaataagcttattattttgttgaaaagggcaggatgtgcatagctatggctcctcgcacactgcttttgctgatttgatgtcagctggtgtttgggttcaatgaacctcttaacatcgtttcacatttaaatgatgactggtttctatttggtgacagtcggtccgactgtacctatgtagaaaataacggtcatcctaaattagattggcttgacctcgacccaaagttgtgtaattcaggaaagatttccgcaaagagtggtaactctctctttaggagttttcacttcactgatttttacaattatacgggtgagggataccaaattgtattttatgaaggagttaattttagtcccagccatggctttaaatgcctggctcatggagataataaaagatggatgggcaataaagctcgattttatgcccgagtgtatgagaagatggcccaatataggagcctatcgtttgttaatgtgtcttatgcctatggaggtaatgcaaagcccgcctccatttgcaaagacaatactttaacactcaataaccccaccttcatatcgaaggagtctaattatgttgattactactacgagagtgaggctaatttcacactagaaggttgtgatgaatttatagtaccgctctgtggttttaatggccattccaagggctcgtcgtcggatgctgccaataaatattatactgactctcagagttactataatatggatattggtgtcttatatgggttcaattcgaccttggatgttggcaacactgctaaggatccgggtcttgatctcacttgtaggtatcttgcattgactcctggtaattataaggctgtgtccttagaatatttgttaagcttaccctcaaaggctatttgcctccataagacaaagcgctttatgcctgtgcaggtagttgactcaaggtggagtagcatccgccagtcagacaatatgaccgctgcagcctgtcagctgccatattgtttctttcgcaacacatctgcgaattatagtggtggcacacatgatgcgcaccatggtgattttcatttcaggcagttattgtctggtttgttatataatgtttcctgtattgcccagcagggtgcatttctttataataatgtgtcgtcctcttggccagcctatgggtacggtcattgtccaacggcagctaacattggttatatggcacctgtttgtatctatgaccctctcccggtcatactgctaggtgtgttattgggtatagctgtgttgactattgtgtttctgatgttttattttatgacggatagcggtgttagattgcatgaggcataatctaaacatgtttgtttttcttgttttattgccactagtctctagtcagtgtgttaatcttacaaccagaactcaattaccccctgcatacactaattctttcacacgtggtgtttattaccctgacaaagttttcagatcctcagttttacattcaactcaggacttgttcttacctttcttttccaatgttacttggttccatgctatacatgtctctgggaccaatggtactaagaggtttgataaccctgtcctaccatttaatgatggtgtttactttgcttccactgagaagtctaacataataagaggctggatttttggtactactttagattcgaaaacccagtccctacttattgttaataacgctactaatgttgttatcaaagtctgtgaatttcaattttgtaacgatccatttttgggtgtttattaccacaaaaacaacaaaagttggatggaaagtgagttcagagtttattctagtgcgaataattgcacttttgaatacgtctctcagccttttcttatggaccttgaaggaaaacagggtaatttcaaaaatcttagggaatttgtgttcaagaatattgatggttacttcaagatatactctaagcacacgcctattaatttagtgcgtgatctccctcagggtttttcggctttagaaccattggtagatttgccaataggtattaacatcactaggtttcaaactttacttgctttacatagaagttatttaactcctggtgattcttcttcaggttggacagctggtgctgcagcttattatgtgggttatcttcaacctaggacttttctactgaagtacaatgaaaatggaaccattacagatgctgtagactgtgcacttgaccctctctcagaaacaaagtgtacgttgaaatccttcactgtagaaaaaggaatctatcaaacttctaactttagagtccaaccaacagaatctattgttagatttcctaacatcacaaacttgtgcccttttggtgaagtttttaacgccaccagatttgcatctgtttatgcttggaacaggaagagaatcagcaactgtgttgctgattattctgtcctgtataattccgcatcattttccacttttaagtgttatggagtgtctcctactaaattaaatgatctctgctttactaatgtctatgcagattcatttgtaattagaggtgatgaagtcagacaaatcgctccagggcaaactggaaagattgctgattataactacaaattaccagatgattttacaggctgcgttatagcttggaattctaacaatcttgattctaaggttggtggtaattataattacctgtacagattgtttaggaagtctaatctcaaaccttttgagagagatatttcaactgaaatctatcaggccggtagcacaccttgtaatggtgttgaaggttttaattgttactttcctctgcaatcatatggtttccaacccactaatggtgttggttaccaaccatacagagtagtagtactttcttttgaacttctacatgcaccagcaactgtttgtggacctaaaaagtctactaatttggttaagaacaagtgtgtcaatttcaacttcaatggtttaacaggcacaggtgttcttactgagtctaacaaaaagtttctgcctttccaacaatttggcagagacattgctgacactactgatgctgttcgtgatccacaaacacttgagattcttgacattacaccatgttcttttggtggtgtcagtgttataacaccaggaacaaatacttctaaccaggttgctgttctttatcaggatgttaactgcacagaagtccctgttgctattcatgcagatcaacttactcctacttggcgtgtttattctacaggttctaatgtttttcaaacacgtgcaggctgtttaataggggctgaacatgtcaacaactcatatgagtgtgacatacccattggtgcaggtatatgcgctagttatcagactcagactaattctcctcggagagcaagaagtgtagctagtcaatccatcattgcctacactatgtcacttggtgcagaaaattcagttgcttactctaataactctattgccatacccacaaattttactattagcgttaccacagaaattctaccagtgtctatgaccaagacatcagtagattgtacaatgtacatttgtggtgattcaactgaatgcagcaatcttttgttgcaatatggcagtttttgtacacaattaaaccgtgctttaactggaatagctgttgaacaagacaaaaacacccaagaagtttttgcacaagtcaaacaaatttacaagacaccaccaattaaagattttggcggttttaattttagccagatactgccagatccatcaaaaccaagcaagaggtcatttattgaagatctactgttcaacaaagtgacacttgcagatgctggcttcatcaaacaatatggtgattgccttggtgatattgctgctagagacctcatttgtgcacaaaagtttaacggccttactgttttgccacctttgctcacagatgaaatgattgctcaatacacttctgcactgttagcaggtacaatcacttctggttggacttttggtgcaggtgctgcattacaaataccatttgctatgcaaatggcttataggtttaatggtattggagttacacagaatgttctctatgagaaccaaaaattgattgccaaccaatttaatagtgctattggcaaaattcaagactcactttcttccacagcaagtgcacttggaaaacttcaagatgtggtcaaccaaaatgcacaagctttaaacacgcttgttaaacaacttagctccaattttggtgcaatttcaagtgttttaaacgacatcctttcacgtcttgacaaagttgaggctgaagtgcaaattgataggttgatcacaggcagacttcaaagtttgcagacatatgtgactcaacaattaattagagctgcagaaatcagagcttctgctaatcttgctgctactaaaatgtcagagtgtgtacttggacaatcaaaaagagttgacttttgcggaaagggctatcatcttatgtcatttcctcagtcagcacctcatggtgtcgtctttttgcatgtgacttatgtccctgcacaagaaaagaacttcacaactgctcctgccatttgtcatgatggaaaagcacactttcctcgtgaaggtgtctttgtttcaaatggcacacactggtttgtaacacaaaggaatttttatgaaccacaaatcattactacagacaacacatttgtgtctggtaactgtgatgttgtaataggaattgtcaacaacacagtttatgatcctttgcaacctgaattagactcattcaaggaggagcttgataaatacttcaagaaccatacctcaccagatgttgatttaggtgacatctctggcattaatgcttcagttgtaaacattcagaaagaaatcgaccgcctcaatgaggttgccaagaatttaaatgaatctctcatcgatctccaagaacttggaaagtatgagcagtatataaaatggccatggtacatttggctaggttttatagctggcttgattgccatagtaatggtgacaattatgctttgctgtatgaccagttgctgtagttgtctcaagggctgttgttcttgtggatcctgctgcaaatttgacgaggacgactctgagccagtgctcaaaggagtcaaattacattacacataactatcacagcctctcctggaaagacagaaaatctaaacaatttatagcattctcattgctacctggccccgtaagaggcagtcatagctatggccgtgttggtcctaaggctacattggctgctgtctttattggtccatttattgtagcatgtatgctaggcattggcctagtttatttattgcaattgcaagttcaaatttttcatgttaaggataccatacgtgtgactggcaagccagccactgtgtcttatactacaagtacaccagtaacaccgagcgcgacgacgctcgatggtactacgtatactttaattagacccactagctcttatacaagagtttatcttggtactccaagaggttttgattatagtacatttgggcctaagaccctagattatgttactaatctaaacctcatcttaattctggtcgtccatatacttttaaggcattgtccaggcatatgaggccaacagccacatggatttggcatgtgagtgatgcatggttacgccgcacgcgggactttggtgtcattcgcctagaagatttttgttttcaatttaattatagccaaccccgagttggttattgtagagttcctttaaaggcttggtgtagcaaccagggtaaatttgcagcgcagtttaccctaaaaagttgcgaaaaaccaggtcacgaaaaatttattactagcttcacggcctacggcagaactgtccaacaggccgttagcaagttagtagaagaagctgttgattttattctttttagggccacgcagctcgaaagaaatgtttaatttattccttacagacacagtatggtatgtggggcagattatttttatattcgcagtgtgtttgatggtcaccataattgtggttgccttccttgcgtctatcaaactttgtattcaactttgcggtttatgtaatactttggtgctgtccccttctatttatttgtatgataggagtaagcagctttataagtactataatgaagaaatgagactgcccctattagaggtggatgatatctaatccaaacattatgagtagtactactcaggccccagagcccgtctatcaatggaccgccgacgaggcagttcaattccttaaggaatggaacttctcgttgggcattatactactctttattactatcatactacagttcggttacacgagccgtagcatgtttatttatgttgtgaaaatgataatcttgtggttaatgtggccactgactattgttttgtgtattttcaattgcgtgtatgcgctaaataatgtgtatcttggattttctatagtgtttactatagtgtccattgtaatctggatcatgtattttgtgaacagcataaggttgtttatcaggactggtagctggtggagcttcaaccccgaaacaaacaaccttatgtgtatagatatgaaaggtaccgtgtatgttagacccattattgaggattaccatacactaacagccactattattcgtggccacctctacatgcaaggtgttaagctaggcaccggtttctctttgtctgacttgcccgcttatgttacagttgctaaggtgtcacacctttgcacttataagcgcgcattcttagacaaggtagacggtgttagcggttttgctgtttatgtgaagtccaaggtcggaaattaccgactgccctcaaacaaaccgagtggcgcggacaccgcattgttgagaacctaatctaaactttaaggagagaatgaatcctatgtcggcgctcggtggtaacccctcgcgagaaagtcgggataggacactctctatcagaatggatgtcttgctgtcataacagatagagaaggttgtggcagaccctgtatcaattagttgaaagagattgcaaaatagagaatgtgtgagagaagttagcaaggtcctacgtctaaccataagaacggcgataggcgccccctgggaacagctcacatcagggtactattcctgcaatgccctagtaaatgaatgaagttgatcatggccaattggaagaatcacaaaaaaaaaaaaaaaaacggccggtttaaacgctacagtccaagttccaagcgggatactagatgtataatgtccgccatgcagacgaaaccagtcggagattaccgagcattctatcacgtcggcgaccaatagtgagcttagggataacagggtaataaacgatccccgggaattcactggccgtcgttttacaacgtcgtgactgggaaaaccctggcgttacccaacttaatcgccttgcagcacatccccctttcgccagctggcgtaatagcgaagaggcccgcaccgatcgcccttcccaacagttgcgcagcctgaatggcgaatggcgatagatccggtggatgaccttttgaatgacctttaatagattatattactaattaattggggaccctagaggtccccttttttattttaaaaattttttcacaaaacggtttacaagcataaagctcggacggatcttttccgctgcataaccctgcttcggggtcattatagcgattttttcggtatatccatcctttttcgcacgatatacaggattttgccaaagggttcgtgtagactttccttggtgtatccaacggcgtcagccgggcaggataggtgaagtaggcccacccgcgagcgggtgttccttcttcactgtcccttattcgcacctggcggtgctcaacgggaatcctgctctgcgaggctggccggctaccgccggcgtaacagatgagggcaagcggatggctgatgaaaccaagccaaccaggaagggcagcccacctatcaaggtgtcgatgcaggggggggggaaagccacgttgtgtctcaaaatctctgatgttacattgcacaagataaaaatatatcatcatgaacaataaaactgtctgcttacataaacagtaatacaaggggtgttatgagccatattcaacgggaaacgtcttgctcaaggccgcgattaaattccaacatggatgctgatttatatgggtataaatgggctcgcgataatgtcgggcaatcaggtgcgacaatctatcgattgtatgggaagcccgatgcgccagagttgtttctgaaacatggcaaaggtagcgttgccaatgatgttacagatgagatggtcagactaaactggctgacggaatttatgcctcttccgaccatcaagcattttatccgtactcctgatgatgcatggttactcaccactgcgatccccggaaaaacagcattccaggtattagaagaatatcctgattcaggtgaaaatattgttgatgcgctggcagtgttcctgcgccggttgcattcgattcctgtttgtaattgtccttttaacagcgatcgcgtatttcgtctcgctcaggcgcaatcacgaatgaataacggtttggttgatgcgagtgattttgatgacgagcgtaatggctggcctgttgaacaagtctggaaagaaatgcataagtttttgccattctcaccggattcagtcgtcactcatggtgatttctcacttgataaccttatttttgacgaggggaaattaataggttgtattgatgttggacgagtcggaatcgcagaccgataccaggatcttgccatcctatggaactgcctcggtgagttttctccttcattacagaaacggctttttcaaaaatatggtattgataatcctgatatgaataaattgcagtttcatttgatgctcgatgagtttttctaatcagaattggttaattggttgtaacactggcagagcattacgctgacttgacgggacggcggctttgttgaataaatcgaacttttgctgagttgaaggatcagatcacgcatcttcccgacaacgcagaccgttccgtggcaaagcaaaagttcaaaatcaccaactggtccacctacaacaaagctctcatcaaccgtggctccctcactttctggctggatgatggggcgattcaggcctggtatgagtcagcaacaccttcttcacgaggcagacctcagacggtatcggatcgatcccccgatgtgtagcagtggcggaccatataggcagatcagaaggcgcggttctcctacatgagcttttcaattcaattcatcattttttttttattcttttttttgatttcggtttccttgaaatttttttgattcggtaatctccgaacagaaggaagaacgaaggaaggagcacagacttagattggtatatatacgcatatgtagtgttgaagaaacatgaaattgcccagtattcttaacccaactgcacagaacaaaaacctgcaggaaacgaagataaatcatgtcgaaagctacatataaggaacgtgctgctactcatcctagtcctgttgctgccaagctatttaatatcatgcacgaaaagcaaacaaacttgtgtgcttcattggatgttcgtaccaccaaggaattactggagttagttgaagcattaggtcccaaaatttgtttactaaaaacacatgtggatatcttgactgatttttccatggagggcacagttaagccgctaaaggcattatccgccaagtacaattttttactcttcgaagacagaaaatttgctgacattggtaatacagtcaaattgcagtactctgcgggtgtatacagaatagcagaatgggcagacattacgaatgcacacggtgtggtgggcccaggtattgttagcggtttgaagcaggcggcagaagaagtaacaaaggaacctagaggccttttgatgttagcagaattgtcatgcaagggctccctatctactggagaatatactaagggtactgttgacattgcgaagagcgacaaagattttgttatcggctttattgctcaaagagacatgggtggaagagatgaaggttacgattggttgattatgacacccggtgtgggtttagatgacaagggagacgcattgggtcaacagtatagaaccgtggatgatgtggtctctacaggatctgacattattattgttggaagaggactatttgcaaagggaagggatgctaaggtagagggtgaacgttacagaaaagcaggctgggaagcatatttgagaagatgcggccagcaaaactaaaaaactgtattataagtaaatgcatgtatactaaactcacaaattagagcttcaatttaattatatcagttattacccgggaatctcggtcgtaatgatttttataatgacgaaaaaaaaaaaattggaaagaaaaagctgggcgcgccggccggcccttttcatcacgtgctataaaaataattataatttaaattttttaatataaatatataaattaaaaatagaaagtaaaaaaagaaattaaagaaaaaatagtttttgttttccgaagatgtaaaagactctagggggatcgccaacaaatactaccttttatcttgctcttcctgctctcaggtattaatgccgaattgtttcatcttgtctgtgtagaagaccacacacgaaaatcctgtgattttacattttacttatcgttaatcgaatgtatatctatttaatctgcttttcttgtctaataaatatatatgtaaagtacgctttttgttgaaattttttaaacctttgtttatttttttttttcttcattccgtaactcttctaccttctttatttactttctaaaatccaaatacaaaacataaaaataaataaacacagagtaaattcccaaattattccatcattaaaagatacgaggcgcgtgtaagttacaggcaagcgatcggccggcccgggcatttaaatgcaggccgcgtacgcgtcgacggtaccgaattcgcttaaacgagctcatgttcgccggtgaacgcgttgaggaagccgggcagtgcctcggcaaaatccttgcgtgtagacaagacatctgcgtagcagttgtcctcaacaacgatgtcgaaatccaaatcggagtgctcatcgagtcctccgtgaacgtaagagccgccgatcagaagagcgcggaagcgaacatcggaagcgaccgcatcgcggatgcggttcaagaaagttgcatgagcttgtggaagtgtgctgagcataaatgattctcctagctgttctttgggtaagtacgccatcaggacgttgtgagtggcgcgatttttagcggctgaaatcagcccttgagcctgtcggcaagtcgcgtcatgaggtccatgcgctcatgcaggatcgccacgaccaacgcgggttcgcccgcacgcggcaggcaaaaaacgtagtggtgttcgcagcgggccatccgcagcgcgggaaagagttcgctcatgtccttaaacgggccttcgccggcggcaagcctggctatgccctgttccagcttagcgatatagcggcgcacctgcgccgcgccccactcccggcgcgtgtagcggatgatgccgcgtagatcggcttcggcctcagccgtgaggatgtaggccgtcaagcgcgatccccgctgagttcttcatcaagaatttcgccgacgctcttggtggacaccttgccggcaagcccatcgttgatgcggttccccagcatggttttcagttcctgccatgcctgatcggcatcagcgtcaccggggaacagacgttcgagggcgtattgcttaatggtcttgccctgcaaggcggccagggctttcaggctctggtgctgctggtccgtcatgtcgattgtcaggcggctcattggataacctccataaaatacacgtaaccacattagcacatatgtgggcgtgaggctacagcgcgaggcgcattaaggtcgggaaaatgcgctaggcgcatttaaattgcgtattgctgtaatgcgccatgccggctagactaggcccaaatgggtatacccaatttgaccaagggggacgcgatgagggcggccaagcactaccgacaacttctatccatcgacttcaacatcgaggcgctggccttcgtgcctggacccgacggcacacgcggccggcgcatccacgtcctggggcgcgaggtccgcgaccggcccggcctggtcgagtacctttcgccggcgttcggctcgcgggtggcgctggacggctactgcaaggccaatttcgatgcagtgctgcacctggcgtaccccgatcatcagcaatggggccacgcatgaagcgccgaagctacgccatgctgcgcgccgctgccgcgctggccgtcctggtcgttgcctcgccggcatgggccgagctgcgcggcgaggtcgtgcgcatcatcgacggcgacaccatcgacgtgctggtagacaagcagccggtgcgcgtgcgcctggtggacattgacgcgccggaaaagcggcaagccttcggcgaacgtgcgcgccaggcgctggccggcatggtgttccgccggcacgtcctggtcgacgagaaggacaccgaccgttacggccgcacgctgggcaccgtgtgggtcaacatggagctggccagccggccgccgcagccgcgcaacgtcaacgccgcgatggttcaccagggcatggcgtgggcctatcgcttccacggccgcgcggccgaccctgaaatgctgcggctcgaacaggaggcgcgaggcaagcgcgtcggcctctggtccgatccgcacgccgtcgagccgtggaaatggcgacgcgagagcaacaaccggagggacgaaggttgaaggtcgcccgcatctacctgcgcgccagtacggacgagcagaatcttgaacgccaggagagccttgtagcggccacgcgggccgccgggtactacgtcgccggcatctaccgcgagaaggcgtccggcgcacgcgccgaccggcccgagctgctgcgcatgatcgcggacctgcaacctggtgaagtcgtcgttgcggagaagatcgaccgcatcagccgcttgccgttggccgaggccgagcgcctggttgcgtcgatccgggccaaaggggccaagctggccgtgcctggcgtggtggacctgtcggagctggccgccgaggcgaacggagtggcgaaaatcgttctggaatccgtccaggacatgcttttgaagctcgccttgcagatggcccgcgacgactacgaggatcggcgcgagcgtcaacgtcagggtgtccagttggcgaaggccgccggccgctacaccggccgcaaacgtgacgccggcatgcacgaccgcatcatcacgcttcgctccggcggatcgagcattgccaagacggccaagctggtcggatgcagcccgagccaggtcaaacgagtgtgggcggcctggaacgcgcagcagcaaaaataaagccgggcagtgcccggcttttctcaccttttcgcgtcccgcagggccgctgcgagcgccctacctagatcctcgctttccccctcggtgtagtccggccagggcacgaagggcgcggatgcgaacctgttgagcaggtacgccttcgggcagcggtagaccaccggcgagttcgccttttcatcccaccgggccaggatcacgtccgcatcacagtgcatgtccttcacctggtcgcggaagaagccgaaggccaccatgccgctatgttcgccgaggaacgccagttgcttcgcgctggcgatcgcgccgacgccgccggccaaaaccgacgccatcacccagccgacgaaccagaagctggcatgcttgcggttgaccaccgcacgcgcagccgcgaccaggacaacggccaagctgccgaccagggccatgacgaccgtgatccggccgttgtggaaagcgatgggcttgccagcgtccgcttgcacggcgtcgtaaatgctggacccgatgggcgcgcacatcagcacgacaggcagcagcaccaggaacatcgtccgcgtccattgcgcgagtgccttgcggcgttcgccggcggcaagcgcctccatcatcggcgtgaagcccaacagggccaccgcagccgccaagccggcaacgatgccgcaggcgattacatacatacatcctccctaatgcgccttgcgcacggttgtagtcagagtccgcggtggggcgataagctcatgaccaaaatcccttaacgtgagttttcgttccactgagcgtcagaccccgtagaaaagatcaaaggatcttcttgagatcctttttttctgcgggggatcaggaccgctgccggagcgcaacccactcactacagcagagccatgtagacaacatcccctccccctttccaccgcgtcagacgcccgtagcagcccgctacgggctttttcatgccctgccctagcgtccaagcctcacggccgcgctcggcctctctggcggccttctggcgctcctgctgcggcgtccgctcgtgggccgtggcgcgggtccgcgcgccggcctcgtgcgcctggcgctcgcgggcgaggtccagggcggccgtcttcacgttctgccttgcgcagatgagatagatcgatctagcgtggactcaaggctctcgcgaatggctcgcgttggaaactttcattgacacttgaggggcaccgcagggaaattctcgtccttgcgagaaccggctatgtcgtgctgcgcatcgagcctgcgcccttggcttgtctcgcccctctccgcgtcgctacggggcttccagcgcctttccgacgctcaccgggctggttgccctcgccgctgggctggcggccgtctatggccctgcaaacgcgccagaaacgccgtcgaagccgtgtgcgagacaccgcggccgccggcgttgtggatacctcgcggaaaacttggccctcactgacagatgaggggcggacgttgacacttgaggggccgactcacccggcgcggcgttgacagatgaggggcaggctcgatttcggccggcgacgtggagctggccagcctcgcaaatcggcgaaaacgcctgattttacgcgagtttcccacagatgatgtggacaagcctggggataagtgccctgcggtattgacacttgaggggcgcgactactgacagatgaggggcgcgatccttgacacttgaggggcagagtgctgacagatgaggggcgcacctattgacatttgaggggctgtccacaggcagaaaatccagcatttgcaagggtttccgcccgtttttcggccaccgctaacctgtcttttaacctgcttttaaaccaatatttataaaccttgtttttaaccagggctgcgccctgtgcgcgtgaccgcgcacgccgaaggggggtgcccccccttctcgaaccctcccggcccgctaacgcgggcctcccatccccccaggggctgcgcccctcggccgcgaacggcctcaccccaaaaatggcagcgctggcagtccttgccattgccgggatcggggcagtaacgggatgggcgatcagcccgagcgcgacgcccggaagcattgacgtgccgcaggtgctggcatcgacattcagcgaccaggtgccgggcagtgagggcggcggcctgggtggcggcctgcccttcacttcggccgtcggggcattcacggacttcatggcggggccggcaatttttaccttgggcattcttggcatagtggtcgcgggtgccgtgctcgtgttcgggggtgaattaattccccggatcgatccgtcagcttcacgctgccgcaagcactcagggcgcaagggctgctaaaggaagcggaacacgtagaaagccagtccgcagaaacggtgctgaccccggatgaatgtcagctactgggctatctggacaagggaaaacgcaagcgcaaagagaaagcaggtagcttgcagtgggcttacatggcgatagctagactgggcggttttatggacagcaagcgaaccggaattgccagctggggcgccctctggtaaggttgggaagccctgcaaagtaaactggatggctttcttgccgccaaggatctgatggcgcaggggatcaagatcgacggatcgatccggggaattaattccggggcaatcccgcaaggagggtga

SEQ ID NO: 40 - DNA, 38383 bp, Artificial Sequence
  pMR10Y_COVAX191_delHEN
atgaatcggacgtttgaccggaaggcatacaggcaagaactgatcgacgcggggttttccgccgaggatgccgaaaccatcgcaagccgcaccgtcatgcgtgcgccccgcgaaaccttccagtccgtcggctcgatggtccagcaagctacggccaagatcgagcgcgacagcgtgcaactggctccccctgccctgcccgcgccatcggccgccgtggagcgttcgcgtcgtctcgaacaggaggcggcaggtttggcgaagtcgatgaccatcgacacgcgaggaactatgacgaccaagaagcgaaaaaccgccggcgaggacctggcaaaacaggtcagcgaggccaagcaggccgcgttgctgaaacacacgaagcagcagatcaaggaaatgcagctttccttgttcgatattgcgccgtggccggacacgatgcgagcgatgccaaacgacacggcccgctctgccctgttcaccacgcgcaacaagaaaatcccgcgcgaggcgctgcaaaacaaggtcattttccacgtcaacaaggacgtgaagatcacctacaccggcgtcgagctgcgggccgacgatgacgaactggtgtggcagcaggtgttggagtacgcgaagcgcacccctatcggcgagccgatcaccttcacgttctacgagctttgccaggacctgggctggtcgatcaatggccggtattacacgaaggccgaggaatgcctgtcgcgcctacaggcgacggcgatgggcttcacgtccgaccgcgttgggcacctggaatcggtgtcgctgctgcaccgcttccgcgtcctggaccgtggcaagaaaacgtcccgttgccaggtcctgatcgacgaggaaatcgtcgtgctgtttgctggcgaccactacacgaaattcatatgggagaagtaccgcaagctgtcgccgacggcccgacggatgttcgactatttcagctcgcaccgggagccgtacccgctcaagctggaaaccttccgcctcatgtgcggatcggattccacccgcgtgaagaagtggcgcgagcaggtcggcgaagcctgcgaagagttgcgaggcagcggcctggtggaacacgcctgggtcaatgatgacctggtgcattgcaaacgctagggccttgtggggtcagttccggctgggggttcagcagccactcgatcgaggtcccaatacgcaaaccgcctctccccgcgcgttggccgattcattaatgcagctggcacgacaggtttcccgactggaaagcgggcagtgagcgcaacgcaattaatgtgagttagctcactcattaggcaccccaggctttacactttatgcttccggctcgtatgttgtgtggaattgtgagcggataacaatttcacacaggaaacagctatgaccatgattacgccaagcttccatgggatatcgagatctcctgcagagctctagagtcgagactagtctcgacgggcccggtaccccctcgagggggccgcacttaagttacgcgtggatcgtggagctttcgggttttaactataacggtcctaaggtagcgaactcgggtcttgccttaatcccaacaaccggattatctacacggatttcaatagctgatatagcgaatcaccgagattaattaataatacgactcactatagtataagagtgattggcgtccgtacgtaccctctcaactctaaaactcttgtagtttaaatctaatctaaactttataaacggcacttcctgcgtgtccatgcccgcgggcctggtcttgtcatagtgctgacatttgtagttccttgactttcgttctctgccagtgacgtgtccattcggcgccagcagcccacccataggttgcataatggcaaagatgggcaaatacggcctgggcttcaaatgggccccagaatttccatggatgcttccgaacgcatcggagaagttgggtaaccctgagaggtcagaggaggatgggttttgcccctctgctgcgcaagaaccgaaagttaaaggaaaaactttggttaatcacgtgagggtgaattgtagccggcttccagctttggaatgctgtgttcagtctgccataatccgtgatatttttgtagatgaggatccccagaaggtggaggcctcaactatgatggcattgcagttcggtagtgccgtcttggttaagccatccaagcgcttgtctattcaggcatggactaatttgggtgtgcttcccaaaacagctgccatggggttgttcaagcgcgtctgcctgtgtaacaccagggagtgctcttgtgacgcccacgtggcctttcacctttttacggtccaacccgatggtgtatgcctgggtaatggccgttttataggctggttcgttccagtcacagccataccggagtatgcgaagcagtggttgcaaccctggtccatccttcttcgtaagggtggtaacaaagggtctgtgacatccggccacttccgccgcgctgttaccatgcctgtgtatgactttaatgtagaggatgcttgtgaggaggttcatcttaacccgaagggtaagtactcctgcaaggcgtatgccctgctgaagggctatcgcggtgttaagcccatcctgtttgtggaccagtatggttgcgactatactggatgtctcgccaagggtcttgaggactatggcgatctcaccttgagtgagatgaaggagttgttccctgtgtggcgtgactccttggatagtgaagtccttgtggcttggcacgttgatcgagatcctcgggctgctatgcgtctgcagactcttgctactgtacgttgcattgattatgtgggccaaccgaccgaggatgtggtggatggagatgtggtagtgcgtgagcctgctcatcttctcgcagccaatgccattgttaaaagactcccccgtttggtggagactatgctgtatacggattcgtccgttacagaattctgttataaaaccaagctgtgtgaatgcggttttatcacgcagtttggctatgtggattgttgtggtgacacctgtgattttcgtgggtgggttgccggcaatatgatggatggctttccatgtccagggtgtaccaaaaattatatgccctgggaattggaggcccagtcatcaggtgttataccagaaggaggtgttctattcactcagagcactgatacagtgaatcgtgagtcctttaagctctacggtcatgctgttgtgccttttggttctgctgtgtattggagcccttgcccaggtatgtggcttccagtaatttggtcgtcggttaagtcatactctggtttgacttatacaggagtagttggttgtaaggcaattgttcaagagacagacgctatatgtcgttctctgtatatggattatgtccagcacaagtgtggcaatctcgagcagagagctatccttggattggacgatgtctatcatagacagttgcttgtgaataggggtgactatagtctcctccttgagaatgtggatttgtttgttaagcggcgcgctgaatttgcttgcaaattcgccacctgtggagatggtcttgtacccctcctactagatggtttagtgccccgcagttattatttgattaagagtggtcaagctttcacctctatgatggttaattttagccatgaggtgactgacatgtgtatggacatggctttattgttcatgcatgatgttaaagtggccactaagtatgttaagaaggttactggcaaactggccgtgcgctttaaagcgttgggtgtagccgttgtcagaaaaattactgaatggtttgatttagccgtggacattgctgctagtgccgctggatggctttgctaccagctggtaaatggcttatttgcagtggccaatggtgttataacctttgtacaggaggtgcctgagcttgtcaagaattttgttgacaagttcaaggcatttttcaaggttttgatcgactctatgtcggtttctatcttgtctggacttactgttgtcaagactgcctcaaatagggtgtgtcttgctggcagtaaggtttatgaagttgtgcagaaatctttgtctgcatatgttatgcctgtgggttgcagcgaagccacttgtttggtgggtgagattgaacctgcagtttttgaagatgatgttgttgatgtggttaaagccccattaacatatcaaggctgttgtaagccacccacttctttcgagaagatttgtattgtggataaattgtatatggccaagtgtggtgatcaattttaccctgtggttgttgataacgacactgttggcgtgttagatcagtgctggaggtttccctgtgcgggcaagaaagtcgagtttaacgacaagcccaaagtcaggaagataccctccacccgtaagattaagatcaccttcgcactggatgcgacctttgatagtgttctttcgaaggcgtgttcagagtttgaagttgataaagatgttacattggatgagctgcttgatgttgtgcttgacgcagttgagagtacgctcagcccttgtaaggagcatgatgtgataggcacaaaagtttgtgctttacttgataggttggcaggagattatgtctatctttttgatgagggaggcgatgaagtgatcgccccgaggatgtattgttccttttctgctcctgatgacgaggactgcgttgcagcggatgttgtagatgcagatgaaaaccaagatgatgatgccgaggactcagcagtccttgtcgctgatacccaagaagaggacggcgttgccaaggggcaggttgaggcggattcggaaatttgcgttgcgcatactggtagtcaagaagaattggctgagcctgatgctgtcggatctcaaactcccatcgcctctgctgaggaaaccgaagtcggagaggcaagcgacagggaagggattgctgaggcgaaggcaactgtgtgtgctgatgctgtagatgcctgccccgatcaagtggaggcatttgaaattgaaaaggtcgaggactctatcttggatgagcttcaaactgaacttaatgcgccagcggacaagacctatgaggatgtcttggcattcgatgccgtatgctcagaggcgttgtctgcattctatgctgtgccgagtgatgagacgcactttaaagtgtgtggattctattcgcctgctatagagcgcactaattgttggctgcgttctactttgatagtaatgcagagtctacctttggaatttaaagacttggagatgcaaaagctctggttgtcttacaaggccggctatgaccaatgctttgtggacaaactagttaagagcgtgcccaagtctattatccttccacaaggtggttatgtggcagattttgcctatttctttctaagccagtgtagctttaaagcttatgctaactggcgttgtttagagtgtgacatggagttaaagcttcaaggcttggacgccatgtttttctatggggacgttgtgtctcatatgtgcaagtgtggtaatagcatgaccttgttgtctgcagatataccctacactttgcattttggagtgcgagatgataagttttgcgctttttacacgccaagaaaggtctttagggctgcttgtgcggtagatgttaatgattgtcactctatggctgtagtagagggcaagcaaattgatggtaaagtggttaccaaatttattggtgacaaatttgattttatggtgggttacgggatgacatttagtatgtctccttttgaactcgcccagttatatggttcatgtataacaccaaatgtttgttttgttaaaggagatgttataaaggttgttcgcttagttaatgctgaagtcattgttaaccctgctaatgggcgtatggctcatggtgccggcgtcgccggcgccatagctgaaaaggcgggcagtgcttttattaaagaaacctccgatatggtgaaggctcagggcgtttgccaggttggtgaatgctatgaatctgccggtggtaagttatgtaaaaaggtgcttaacattgtagggccagatgcgcgagggcatggcaagcaatgctattcacttttagagcgtgcttatcagcatattaataagtgtgacaatgttgtcactactttaatttcggctggtatatttagtgtgcctactgatgtctccctaacttacttacttggtgtagtgacaaagaatgtcattcttgtcagtaacaaccaggatgattttgatgtgatagagaagtgtcaggtgacctccgttgctggtaccaaagcgctatcacttcaattggccaaaaatttgtgccgtgatgtaaagtttgtgacgaatgcatgtagttcgctttttagtgaatcttgctttgtctcaagctatgatgtgttgcaggaagttgaagcgctgcgacatgatatacaattggatgatgatgctcgtgtctttgtgcaggctaatatggactgtctgcccacagactggcgtctcgttaacaaatttgatagtgttgatggtgttagaaccattaagtattttgaatgcccgggcgggatttttgtatccagccagggcaaaaagtttggttatgttcagaatggttcatttaaggaggcgagtgttagccaaataagggctttactcgctaataaggttgatgtcttgtgtactgttgatggtgttaacttccgctcctgctgcgtagcagagggtgaagtttttggcaagacattaggttcagtcttttgtgatggcataaatgtcaccaaagttaggtgtagtgccatttacaagggtaaggttttctttcagtacagtgatttgtccgaggcagatcttgtggctgttaaagatgcctttggttttgatgaaccacaactgctgaagtactacactatgcttggcatgtgtaagtggccagtagttgtttgtggcaattattttgctttcaagcagtcaaataataattgctacatcaacgtggcatgtttaatgctgcaacacttgagtttaaagtttcctaagtggcaatggcaagaggcttggaacgagttccgctctggtaaaccactaaggtttgtgtccttggtattagcaaagggcagctttaaatttaatgaaccttctgattctatcgattttatgcgtgtggtgctacgtgaagcagatttgagtggtgccacgtgcaatttggaatttgtttgtaaatgtggtgtgaagcaagagcagcgcaaaggtgttgacgctgttatgcattttggtacgttggataaaggtgatcttgtcaggggttataatatcgcatgtacgtgcggtagtaaacttgtgcattgcacccaatttaacgtaccatttttaatttgctccaacacaccagagggtaggaaactgcccgacgatgttgttgcagctaatatttttactggtggtagtgtgggccattacacgcatgtgaaatgtaaacccaagtaccagctttatgatgcttgtaatgttaataaggtttcggaggctaagggtaattttaccgattgcctctaccttaaaaatttaaagcaaaccttctcgtctgtgctgacgactttttatttagatgacgtaaagtgtgtggagtataagccagatttatcgcagtattactgtgagtctggtaaatattatacaaaacccattattaaggcccaatttagaacatttgagaaggttgatggtgtctataccaactttaaattggtgggacatagtattgctgaaaaactcaatgctaagctgggatttgattgtaattctccctttgtggagtacaaaattacagagtggccaacagctactggagatgtggtgttggctagtgatgatttgtatgtaagtcggtacttaagcgggtgcattacttttggtaaaccggttgtctggcttggccatgaggaagcatcgctgaaatctctcacatattttaatagacctagtgtcgtttgtgaaaataaatttaacgtgttgcccgttgatgtcagtgaacccacggacaaggggcctgtgcctgctgcagtccttgttaccggcgtccctggagctgatgcgtcagctggtgccggtattgccaaggagcaaaaagcctgtgcttctgctagtgtggaggatcaggttgttacggaggttcgtcaagagccatctgtttcagctgctgatgtcaaagaggttaaattgaatggtgttaaaaagcctgttaaggtggaaggtagtgtggttgttaatgatcccactagcgaaaccaaagttgttaaaagtttgtctattgttgatgtctatgatatgttcctgacagggtgtaagtatgtggtttggactgctaatgagttgtctcgactagtaaattcaccgactgttagggagtatgtgaagtggggtatgggaaagattgtaacacccgctaagttgttgttgttaagagatgagaagcaagagttcgtagcgccaaaagtagtcaaggcgaaagctattgcctgctattgtgctgtgaagtggtttctcctctattgttttagttggataaagtttaatactgacaataaggttatatacaccacagaagtagcttcaaagcttactttcaagttgtgctgtttggcctttaagaatgccttacagacgtttaattggagcgttgtgtctaggggctttttcctagttgcaacggtctttttactctggtttaactttttgtatgctaatgttattttgagtgacttctatttgcctaatattgggcctctccctacgtttgtgggacagatagttgcgtggtttaagactacatttggtgtgtcaaccatctgtgatttctaccaggtgacggatttgggctatagaagttcgttttgtaatggaagtatggtatgtgaactatgcttctcaggttttgatatgctggacaactatgatgctataaatgttgttcaacacgttgtagataggcgtttgtcctttgactatattagcctatttaaactggtagttgagcttgtaatcggctactctctttatactgtgtgcttctacccactgtttgtccttattggaatgcagttattgaccacatggttgcctgaattctttatgctggagactatgcattggagtgctcgtttgtttgtgtttgttgccaatatgcttccagcttttacgttactgcgattttacatcgtggtgacagctatgtataaggtctattgtctttgtagacatgttatgtatggatgtagtaagcctggttgcttgttttgttataagagaaaccgtagtgtccgtgttaagtgtagcaccgttgttggtggttcactacgctattacgatgtaatggctaacggcggcacaggtttctgtacaaagcaccagtggaactgtcttaattgcaattcctggaaaccaggcaatacattcataactcatgaagcagcggcggacctctctaaggagttgaaacgccctgtgaatccaacagattctgcttattactcggtcacagaggttaagcaggttggttgttccatgcgtttgttctacgagagagatggacagcgtgtttatgatgatgttaatgctagtttgtttgtggacatgaatggtctgctgcattctaaagttaaaggtgtgcctgaaacgcatgttgtggttgttgagaatgaagctgataaagctggttttctcggcgccgcagtgttttatgcacaatcgctctacagacctatgttgatggtggaaaagaaattaataactaccgccaacactggtttgtctgttagtcgaactatgtttgacctttatgtagattcattgctgaacgtcctcgacgtggatcgcaagagtctaacaagttttgtaaatgctgcgcacaactctctaaaggagggtgttcagcttgaacaagttatggatacctttattggctgtgcccgacgtaagtgtgctatagattctgatgttgaaaccaagtctattaccaagtccgtcatgtcggcagtaaatgctggcgttgattttacggatgagagttgtaataacttggtgcctacctatgttaaaagtgacactatcgttgcagccgatttgggtgttcttattcagaataatgctaagcatgtacaggctaatgttgctaaagccgctaatgtggcttgcatttggtctgtggatgcttttaaccagctatctgctgacttacagcataggctgcgaaaagcatgttcaaaaactggcttgaagattaagcttacttataataagcaggaggcaaatgttcctattttaactacaccgttctctcttaaagggggcgctgtttttagtagaatgttacaatggttgtttgttgctaatttgatttgtttcattgtgttgtgggcccttatgccaacatatgcagtgcacaaatcggatatgcagttgcctttatatgccagttttaaagttatagataacggtgtgctaagggatgtgtctgttactgacgcatgcttcgcaaacaaatttaatcaattcgaccaatggtatgagtctacttttggtcttgcttattaccgcaactctaaggcttgtcctgttgtggttgctgtaatagatcaagacattggccataccttatttaatgttcctaccacagttttaagatatggatttcatgtgttgcattttataacccatgcatttgctactgatagcgtgcagtgttacacgccacatatgcaaatcccctatgataatttctatgctagtggttgcgtgttgtcatccctctgtactatgcttgcgcatgcagatggaaccccgcatccttattgttatacagggggtgttatgcataatgcctctctgtatagttctttggctcctcatgtccgttataacctggctagttcaaatggttatatacgttttcccgaagtggttagtgaaggcattgtgcgtgttgtgcgcactcgctctatgacctactgcagggttggtttatgtgaggaggccgaggagggtatctgctttaattttaatcgttcatgggtattgaacaacccgtattatagggccatgcctggaactttttgtggtaggaatgcttttgatttaatacatcaagttttaggaggattagtgcggcctattgatttctttgccttaacggcgagttcagtggctggtgctatccttgcaattattgtcgttttggctttctattatttaatcaagcttaagcgtgcctttggtgactacactagtgttgtggttatcaatgtaattgtgtggtgtataaattttctgatgctttttgtgtttcaggtttatcccacattgtcttgtttatatgcttgtttctacttctacaccacgctttatttcccttcggagataagtgttgttatgcatttgcaatggcttgtcatgtatggtgctattatgcccttgtggttttgcattatttacgtggcagtcgttgtttcaaaccatgcattgtggttgttctcttactgccgcaaaattggtaccgaggttcgtagtgacggcacatttgaggaaatggcccttactacctttatgattactaaagaatcttattgtaagttgaaaaactctgtttctgatgttgcttttaacaggtacttgagtctttacaacaagtaccgttacttcagtggcaaaatggatactgccgcttatagagaggctgcctgttcacaactggcaaaggcaatggaaacatttaaccataataatggtaatgatgttctctatcagcctccaaccgcctctgttactacatcatttttacagtctggtatagtgaagatggtgtcgcccacctctaaagtggagccttgtattgttagtgttacttatggtaacatgacacttaatgggttgtggttggatgataaagtttattgcccaagacatgttatctgttcttcagctgacatgacagaccctgattatcctaatttgctttgtagagtgacatcaagtgatttttgtgttatgtctggtcgtatgagccttactgtaatgtcttatcaaatgcagggctgccaacttgttttgactgttacactgcaaaatcctaacacgcctaagtattccttcggtgttgttaagcctggtgagacatttactgtactggctgcatacaatggcagacctcaaggagccttccatgttacgcttcgtagtagccataccataaagggctcctttctatgtggatcctgcggttctgtaggatatgttttaactggcgatagtgtacgatttgtttatatgcatcagctagagttgagtactggttgtcataccggtactgactttagtgggaacttttatggtccctatagagatgcgcaagttgtacaattgcctgttcaggattatacgcagactgttaatgttgtagcttggctttatgctgctatttttaacagatgcaactggtttgtgcaaagtgatagttgttccctggaggagtttaatgtttgggctatgaccaatggttttagctcaatcaaagccgatcttgtcttggatgcgcttgcttctatgacaggcgttacagttgaacaggtgttggccgctattaagaggctgcattctggattccagggcaaacaaattttaggtagttgtgtgcttgaagatgagctgacaccaagtgatgtttatcaacaactagctggtgtcaagctacagtcaaagcgcacaagagttataaaaggtacatgttgctggatattggcttcaacgtttttgttctgtagcattatctcagcatttgtaaaatggactatgtttatgtatgttactacccatatgttgggagtgacattgtgtgcactttgttttgtaagctttgctatgttgttgatcaagcataagcatttgtatttaactatgtacatcatgcctgtgttatgcacactgttttacaccaactatttggttgtgtacaaacagagttttagaggtctagcttatgcttggctttcacactttgtccctgctgtagattatacatatatggatgaagttttatatggtgttgtgttgctagtagctatggtgtttgttaccatgcgtagcataaaccacgacgtcttttctattatgttcttggttggtagacttgtcagcctggtatccatgtggtattttggagccaatttagaggaagaggtactattgttcctcacatccctatttggcacgtacacatggactactatgttgtcattggctaccgctaaggttattgctaaatggttggctgtgaatgtcttgtacttcacagacgtaccgcaaattaaattagttctgttgagctacttgtgtattggttatgtgtgttgttgttattggggaatcttgtcactccttaatagcatttttaggatgccattgggcgtctacaattataaaatctccgttcaggagttacgttatatgaatgctaatggcttgcgcccacctagaaatagttttgaggccctgatgcttaattttaagctgttgggaattggtggtgtgccagtcattgaagtatctcaaattcaatcaagattgacggatgttaaatgtgctaatgttgtgttgcttaattgcctccagcacttgcatattgcatctaattctaagttgtggcagtattgtagtactttgcacaatgaaatactggctacatctgatttgagcgtggccttcgataagttggctcaactcttagttgttttatttgctaatccagcagcagtggatagcaagtgccttgcaagtattgaagaagtgagcgatgattacgttcgcgacaatactgtcttgcaagccttacagagtgaatttgttaatatggctagcttcgttgagtatgaacttgctaagaagaatctagatgaggctaaggctagcggctctgccaatcaacagcagattaagcagctagagaaggcgtgtaatattgctaagtcagcatatgagcgcgacagagctgttgctcgtaagctggaacgtatggctgatttagctcttacaaacatgtataaagaagctagaattaatgataagaagagtaaggtagtgtctgcattgcaaaccatgctctttagtatggtgcgtaagctagataaccaagctcttaattctattttagacaacgcagttaagggttgtgtacctttgaatgcaataccatcattgacttcgaacactctgactataatagtgccagataagcaggtttttgatcaggttgtggataatgtgtatgtcacctatgctgggaatgtatggcatatacagtttattcaagatgctgatggtgctgttaaacaattgaatgagatagatgttaattcaacctggcctctagtcattgctgcaaataggcataatgaagtgtctactgttgttttgcagaacaatgagttgatgcctcagaagttgagaactcaggttgtcaatagtggctcagatatgaattgtaatactcctacccagtgttactataatactactggcacgggtaagattgtgtatgctatacttagtgactgtgacggcctgaagtacactaagatagtaaaagaagatggaaattgtgttgttttggaattggatcctccctgtaagttttctgttcaggatgtgaagggccttaaaattaagtacctttactttgtgaaggggtgtaatacactggctagaggctgggttgtaggcaccttatcctcgacagtgagattgcaggcgggtacggcaactgagtatgcctccaactctgcaatactgtcgctgtgtgcgttttctgtagatcctaagaaaacgtacttggattatataaaacagggtggagttcccgttactaattgtgttaagatgttatgtgaccatgctggcactggtatggccattactattaagccggaggcaaccactaatcaggattcttatggtggtgcttccgtttgtatatattgccgctcgcgtgttgaacatccagatgttgatggattgtgcaaattacgcggcaagtttgtccaagtgcccttaggcataaaagatcctgtgtcatatgtgttgacgcatgatgtttgtcaggtttgtggcttttggcgagatggtagctgttcctgtgtaggcacaggctcccagtttcagtcaaaagacacgaactttttaaacggattcggggtacaagtgtaaatgcccgtcttgtaccctgtgccagtggcttggacactgatgttcaattaagggcatttgacatttgtaatgctaatcgagctggcattggtttgtattataaagtgaattgctgccgcttccagcgtgtagatgaggacggcaacaagttggataagttctttgttgttaaaagaactaatttagaagtgtataacaaggagaaagaatgctatgagttgacaaaagaatgcggtgttgtggctgaacacgagttcttcacatttgatgtggagggaagtcgggtaccacacatagtccgtaaagatctttcaaagtttactatgttagatctttgctatgcattgcgtcattttgaccgcaatgattgttcaactcttaaggaaattctccttacatatgctgagtgtgaagagtcctacttccaaaagaaggactggtatgattttgttgagaatcctgatataattaatgtgtacaagaagcttggtcctatatttaatagagccctgcttaacactgccaagtttgcagacgcattagtggaggcaggcttagtaggtgttttaacacttgataatcaagatttatatggtcaatggtatgactttggagattttgtcaagacagtacctggttgtggtgttgccgtggcagactcttattattcatatatgatgccaatgctgactatgtgtcatgcgttggatagtgagttgtttgttaatggtacttatagggagtttgaccttgttcagtatgattttactgatttcaagctagagctgttcactaagtattttaagcattggagtatgacctaccacccgaacacctgtgagtgcgaggatgacaggtgcattattcattgcgccaattttaatatacttttcagcatggtcttacctaagacctgttttgggcctcttgttaggcagatatttgtggatggtgttcctttcgttgtgtcgatcggttaccattataaagaattaggtgttgttatgaatatggatgtggatacacatcgttatcgcttgtctcttaaggacttgcttttgtatgctgcagaccctgcccttcatgtggcgtctgctagtgcactgcttgatttgcgcacatgttgttttagcgttgcagctattacaagtggcgtaaaatttcaaacagttaaacctggaaattttaatcaggatttctacgagtttattttgagtaaaggcctgcttaaagaggggagctccgttgatttgaagcacttcttctttacgcaggatggtaatgctgctattactgattacaattactacaagtataatctacccaccatggtggatattaagcagttgttgtttgttttagaagttgttaataagtacttcgagatctatgagggtgggtgtatacccgcaacacaggtcattgttaataattatgacaagagtgctggctatccatttaataaatttggaaaggccaggctctattatgaggcattatcatttgaggagcaggatgaaatttatgcgtataccaaacgcaatgtcctgccgaccctaactcaaatgaatcttaaatatgctattagtgctaagaatagggcccgcaccgttgctggtgtctctattctcagtactatgactggcagaatgtttcatcaaaagtgtctaaagagtatagcagctactcgcggtgttcctgtagttataggcaccacgaagttctatggcggttgggatgatatgttacgccgccttattaaagatgttgatagtcctgtactcatgggttgggactatcctaaatgtgatcgtgctatgccaaacatactgcgtattgttagtagtttggtgctagcccgtaaacatgattcgtgctgttcgcatacggatagattctatcgtcttgcgaacgagtgcgcccaagttttgagtgaaattgttatgtgtggtggttgttattatgttaaaccaggtggcactagtagtggggatgcaaccactgcttttgctaattctgtgtttaacatttgtcaagctgtttccgccaatgtatgctcgcttatggcatgcaatggacacaaaattgaagatttgagtatacgcgagttacaaaagcgcctatactctaatgtctatcgtgcggaccatgttgaccccgcatttgttagtgagtattatgagtttttaaacaagcattttagtatgatgattttgagtgatgatggtgttgtgtgttataattcagagtttgcgtccaagggttatattgctaatataagtgcctttcaacaggtattatattatcaaaacaacgtgtttatgtctgaggccaaatgttgggtagaaacagacatcgaaaagggaccgcatgaattttgttctcaacatacaatgctagtcaagatggatggtgatgaagtctaccttccataccctgatccttcgagaatcttaggagcaggctgttttgttgatgatttactcaagactgatagcgttctcttgatagagcgtttcgtaagtcttgcaattgatgcttatcctttagtataccatgagaacccagagtatcaaaatgtgttccgggtatatttagaatacatcaagaagctgtacaatgatctcggtaatcagatcctggacagctacagtgttattttaagtacttgtgatggtcaaaagtttactgacgagacgttttacaagaacatgtatttaagaagtgcagtgctgcaaagcgttggtgcctgcgttgtctgtagttctcaaacatcattacgttgtggcagttgcatacgcaagcctttgctgtgttgcaaatgcgcctatgatcatgttatgtccactgatcataaatatgtcctgagtgtgtcaccatatgtgtgtaattcaccgggatgtgatgtaaatgatgttaccaaattgtatttaggtggtatgtcatattattgtgaggaccataaaccacagtattcattcaaattggtgatgaatggtatggtttttggtttatataagcagtcttgtactggttcgccctacatagaggattttaataaaatcgctagttgcaaatggacagaagtcgatgattatgtgctagctaatgaatgcaccgaacgccttaaattgtttgccgcagaaacgcagaaggccacagaagaggcctttaagcaatgttatgcgtcagcaacgatccgtgagatcgtgagcgatcgggagttaattttatcttgggaaattggtaaagtccgcccgccacttaataaaaattacgtgttcaccggctaccattttactaataatggtaagacagttttaggtgagtatgtttttgataagagtgagttgactaatggtgtgtattatcgcgccacaaccacttataagttatctgtaggtgatgtgttcattttaacatcacacgcagtgtctagtttaagtgctcctacattagtaccgcaggagaattatactagcattcgttttgctagtgtttatagtgtgcctgagacgtttcagaataatgtgcctaattatcagcacattggaatgaagcgctattgtactgtacagggaccgcctggtactggtaagtcccatctagccattgggctagctgtttattattgtacagcgcgcgtggtgtataccgctgctagccatgctgcagttgacgcgctgtgtgaaaaggcacataaatttctcaacatcaacgactgcacgcgtattgttcctgcaaaggtgcgtgtagattgttatgataaattcaaggtcaatgacaccactcgcaagtatgtgtttactacaataaatgcattacctgagttggtgactgacattattgtcgttgatgaagttagtatgcttaccaactatgagctgtctgttattaacagtcgtgttagggctaagcattatgtgtatattggcgacccggcgcagttacctgcaccacgtgtgctactgaataagggaactctagaacctagatattttaattccgttaccaagctaatgtgttgtttgggtccagatattttcttgggcacctgttatagatgccctaaggagattgtggatacggtgtcagccttggtttataataataagctgaaggctaaaaatgataatagctccatgtgctttaaggtttattataagggccagactacacatgagagttctagtgctgttaatatgcagcaaatacatttaatttccaagtttctgaaggcaaaccccagttggagtaacgccgtatttattagtccttataactcgcagaactatgttgctaagagagtcttgggattacaaacccagacagtagactcagcgcagggttctgaatatgattttgttatctactcacagactgcggaaacagcgcattctgtcaatgtaaatagattcaatgttgctattacacgtgctaagaagggtattctctgtgtcatgagtagtatgcaattatttgagtctcttaattttactacactgacgttggataagattaacaatccacgattacagtgtactacaaatttgtttaaggattgtagcaggagctatgtaggatatcacccagcccatgcaccatcctttttggcagttgatgacaaatataaggtaggcggtgatttagccgtttgccttaatgttgctgattctgctgtcacttattcgcggcttatatcactcatgggattcaagcttgacttgacccttgatggttattgtaagctgtttataactagagatgaagctatcaaacgtgttagagcctgggttggcttcgatgcagaaggtgcccatgcgatacgtgatagcattgggacaaatttcccattacaattaggcttttcgactggaattgattttgttgtcgaagccactggaatgtttgctgagagagatggttatgtctttaaaaaggcagccgcacgagctcctcctggcgaacaatttaaacaccttatcccacttatgtcaagagggcagaaatgggatgtggttcgcattagaatagtacaaatgttgtcagaccacctagtggatttggcagacagtgttgtacttgtgacgtgggctgccagctttgagctcacatgtttgcgatatttcgctaaagttggaagagaagttgtgtgtagtgtctgcaccaagcgtgcgacatgttttaattctagaactggatactatggatgctggcgacatagttattcctgtgattacctgtacaacccactaatagttgacattcaacagtggggatatacaggatctttaactagcaatcatgatcctatttgcagcgtgcataagggtgctcatgttgcatcatctgatgctatcatgacccggtgtctagctgttcatgattgcttttgtaagtctgttaattggaatttagaataccccattatttcaaatgaggtcagtgttaatacctcctgcaggttattgcagcgcgtaatgtttagggctgcgatgctatgcaataggtatgatgtgtgttatgacattggcaaccctaaaggtcttgcctgtgtcaaaggatatgattttaagttctatgacgcctcccctgttgttaagtcggtcaaacagtttgtttacaaatacgaggcacataaagatcaatttttagatggtttgtgtatgttttggaactgcaatgtggataagtatccagcgaatgcagttgtgtgtaggtttgacacgcgtgtgttgaacaaattaaatctccctggctgtaatggtggcagtttgtatgttaacaaacatgcattccacaccagtccctttacccgggctgccttcgagaatttgaagcctatgcctttcttttattattcagatacgccctgtgtgtatatggaaggcatggaatctaagcaggtcgattatgtcccattgagaagcgctacatgcatcacaagatgcaatttaggtggcgctgtttgtttaaaacatgctgaggagtatcgtgagtaccttgagtcttacaatacggcaaccacagcgggttttactttttgggtctataagacttttgatttttacaacctttggaatacttttactaggctccaaagtttagaaaatgtagtgtataacctggtcaacgctggacactttgatggccgggcgggtgaactgccttgtgctgttataggtgagaaagtcattgccaagattcaaaatgaggatgtcgtggtctttaaaaataacacgccattccccactaatgtggctgtcgaattatttgctaagcgcagtattcggccccaccccgagcttaagctctttagaaatttgaatattgacgtgtgctggagtcacgtcctttgggattatgctaaggatagtgtgttttgcagttcgacgtataaggtctgcaaatacacagatttacagtgcattgaaagcttgaatgtactttttgatggtcgtgataatggtgctcttgaagcttttaagaagtgccggaatggcgtctacattaacacgacaaaaattaaaagtctgtcgatgattaaaggcccacaacgtgccgatttgaatggcgtagttgtggagaaagttggagattctgatgtggaattttggtttgctgtgcgtaaagacggtgacgatgttatcttcagccgtacagggagccttgaaccgagccattaccggagcccacaaggtaatccgggtggtaatcgcgtgggtgatctcagcggtaatgaagctctagcgcgtggcactatctttactcaaagcagattattatcttctttcacacctcgatcagagatggagaaagattttatggatttagatgatgatgtgttcattgcaaaatatagtttacaggactacgcgtttgaacacgttgtttatggtagttttaaccagaagattattggaggtttgcatttgcttattggcttagcccgtaggcagcaaaaatccaatctggtaattcaagagttcgtgacatacgactctagcattcattcgtactttatcactgacgagaacagtggtagtagtaagagtgtgtgcactgttattgatttattgttagatgattttgtggacattgtaaagtccctgaatctaaagtgtgtgagtaaggttgttaatgttaatgtggattttaaggacttccagtttatgttgtggtgcaatgaggagaaggtcatgactttctatcctcgtttgcaggctgctgctgactggaaacctggttatgttatgcctgtcttatataagtatttggaatcgcctctggaaagagtaaacctctggaattatggcaagccgattactttacctacaggatgtatgatgaatgttgctaagtatactcaattatgtcaatatttgagcactacaacattagcagttccggctaatatgcgtgtcttacaccttggtgccggttcggataagggtgttgcccctgggtctgcagttcttaggcagtggctaccagcgggaagtattcttgtagataatgatgtgaatccatttgtgagtgacagtgtcgcctcatattatggaaattgtataaccttaccctttgattgtcagtgggatctgataatttctgatatgtacgaccctcttactaagaacattggggagtacaacgtgagtaaagatggattctttacttacctctgtcatttaattcgtgacaagttggctctgggtggcagtgttgccataaaaataacagagttttcttggaacgctgagttatatagtttaatggggaagtttgcgttctggacaatcttttgcaccaacgtaaacgcctcttcaagtgaaggatttttgattggcataaattggttgaataagacccgtaccgaaattgacggtaaaaccatgcatgccaattatctgttttggagaaatagtacaatgtggaatggaggggcttacagtctctttgacatgagtaagttccctttgaaagcggctggtacggctgttgttagccttaaaccagaccaaataaatgacttagtcctctccttgattgagaagggcaagttattagtgcgtgatacacgcaaagaagtttttgttggcgatagcctagtaaatgtcaaataaacgaacaatgtttgtttttcttgttttattgccactagtctctagtcagtgtgttaatcttacaaccagaactcaattaccccctgcatacactaattctttcacacgtggtgtttattaccctgacaaagttttcagatcctcagttttacattcaactcaggacttgttcttacctttcttttccaatgttacttggttccatgctatacatgtctctgggaccaatggtactaagaggtttgataaccctgtcctaccatttaatgatggtgtttactttgcttccactgagaagtctaacataataagaggctggatttttggtactactttagattcgaaaacccagtccctacttattgttaataacgctactaatgttgttatcaaagtctgtgaatttcaattttgtaacgatccatttttgggtgtttattaccacaaaaacaacaaaagttggatggaaagtgagttcagagtttattctagtgcgaataattgcacttttgaatacgtctctcagccttttcttatggaccttgaaggaaaacagggtaatttcaaaaatcttagggaatttgtgttcaagaatattgatggttacttcaagatatactctaagcacacgcctattaatttagtgcgtgatctccctcagggtttttcggctttagaaccattggtagatttgccaataggtattaacatcactaggtttcaaactttacttgctttacatagaagttatttaactcctggtgattcttcttcaggttggacagctggtgctgcagcttattatgtgggttatcttcaacctaggacttttctactgaagtacaatgaaaatggaaccattacagatgctgtagactgtgcacttgaccctctctcagaaacaaagtgtacgttgaaatccttcactgtagaaaaaggaatctatcaaacttctaactttagagtccaaccaacagaatctattgttagatttcctaacatcacaaacttgtgcccttttggtgaagtttttaacgccaccagatttgcatctgtttatgcttggaacaggaagagaatcagcaactgtgttgctgattattctgtcctgtataattccgcatcattttccacttttaagtgttatggagtgtctcctactaaattaaatgatctctgctttactaatgtctatgcagattcatttgtaattagaggtgatgaagtcagacaaatcgctccagggcaaactggaaagattgctgattataactacaaattaccagatgattttacaggctgcgttatagcttggaattctaacaatcttgattctaaggttggtggtaattataattacctgtacagattgtttaggaagtctaatctcaaaccttttgagagagatatttcaactgaaatctatcaggccggtagcacaccttgtaatggtgttgaaggttttaattgttactttcctctgcaatcatatggtttccaacccactaatggtgttggttaccaaccatacagagtagtagtactttcttttgaacttctacatgcaccagcaactgtttgtggacctaaaaagtctactaatttggttaagaacaagtgtgtcaatttcaacttcaatggtttaacaggcacaggtgttcttactgagtctaacaaaaagtttctgcctttccaacaatttggcagagacattgctgacactactgatgctgttcgtgatccacaaacacttgagattcttgacattacaccatgttcttttggtggtgtcagtgttataacaccaggaacaaatacttctaaccaggttgctgttctttatcaggatgttaactgcacagaagtccctgttgctattcatgcagatcaacttactcctacttggcgtgtttattctacaggttctaatgtttttcaaacacgtgcaggctgtttaataggggctgaacatgtcaacaactcatatgagtgtgacatacccattggtgcaggtatatgcgctagttatcagactcagactaattctcctcggagagcaagaagtgtagctagtcaatccatcattgcctacactatgtcacttggtgcagaaaattcagttgcttactctaataactctattgccatacccacaaattttactattagcgttaccacagaaattctaccagtgtctatgaccaagacatcagtagattgtacaatgtacatttgtggtgattcaactgaatgcagcaatcttttgttgcaatatggcagtttttgtacacaattaaaccgtgctttaactggaatagctgttgaacaagacaaaaacacccaagaagtttttgcacaagtcaaacaaatttacaagacaccaccaattaaagattttggcggttttaattttagccagatactgccagatccatcaaaaccaagcaagaggtcatttattgaagatctactgttcaacaaagtgacacttgcagatgctggcttcatcaaacaatatggtgattgccttggtgatattgctgctagagacctcatttgtgcacaaaagtttaacggccttactgttttgccacctttgctcacagatgaaatgattgctcaatacacttctgcactgttagcaggtacaatcacttctggttggacttttggtgcaggtgctgcattacaaataccatttgctatgcaaatggcttataggtttaatggtattggagttacacagaatgttctctatgagaaccaaaaattgattgccaaccaatttaatagtgctattggcaaaattcaagactcactttcttccacagcaagtgcacttggaaaacttcaagatgtggtcaaccaaaatgcacaagctttaaacacgcttgttaaacaacttagctccaattttggtgcaatttcaagtgttttaaacgacatcctttcacgtcttgacaaagttgaggctgaagtgcaaattgataggttgatcacaggcagacttcaaagtttgcagacatatgtgactcaacaattaattagagctgcagaaatcagagcttctgctaatcttgctgctactaaaatgtcagagtgtgtacttggacaatcaaaaagagttgacttttgcggaaagggctatcatcttatgtcatttcctcagtcagcacctcatggtgtcgtctttttgcatgtgacttatgtccctgcacaagaaaagaacttcacaactgctcctgccatttgtcatgatggaaaagcacactttcctcgtgaaggtgtctttgtttcaaatggcacacactggtttgtaacacaaaggaatttttatgaaccacaaatcattactacagacaacacatttgtgtctggtaactgtgatgttgtaataggaattgtcaacaacacagtttatgatcctttgcaacctgaattagactcattcaaggaggagcttgataaatacttcaagaaccatacctcaccagatgttgatttaggtgacatctctggcattaatgcttcagttgtaaacattcagaaagaaatcgaccgcctcaatgaggttgccaagaatttaaatgaatctctcatcgatctccaagaacttggaaagtatgagcagtatataaaatggccatggtacatttggctaggttttatagctggcttgattgccatagtaatggtgacaattatgctttgctgtatgaccagttgctgtagttgtctcaagggctgttgttcttgtggatcctgctgcaaatttgacgaggacgactctgagccagtgctcaaaggagtcaaattacattacacataactatcacagcctctcctggaaagacagaaaatctaaacaatttatagcattctcattgctacctggccccgtaagaggcagtcatagctatggccgtgttggtcctaaggctacattggctgctgtctttattggtccatttattgtagcatgtatgctaggcattggcctagtttatttattgcaattgcaagttcaaatttttcatgttaaggataccatacgtgtgactggcaagccagccactgtgtcttatactacaagtacaccagtaacaccgagcgcgacgacgctcgatggtactacgtatactttaattagacccactagctcttatacaagagtttatcttggtactccaagaggttttgattatagtacatttgggcctaagaccctagattatgttactaatctaaacctcatcttaattctggtcgtccatatacttttaaggcattgtccaggcatatgaggccaacagccacatggatttggcatgtgagtgatgcatggttacgccgcacgcgggactttggtgtcattcgcctagaagatttttgttttcaatttaattatagccaaccccgagttggttattgtagagttcctttaaaggcttggtgtagcaaccagggtaaatttgcagcgcagtttaccctaaaaagttgcgaaaaaccaggtcacgaaaaatttattactagcttcacggcctacggcagaactgtccaacaggccgttagcaagttagtagaagaagctgttgattttattctttttagggccacgcagctcgaaagaaatgtttaatttattccttacagacacagtatggtatgtggggcagattatttttatattcgcagtgtgtttgatggtcaccataattgtggttgccttccttgcgtctatcaaactttgtattcaactttgcggtttatgtaatactttggtgctgtccccttctatttatttgtatgataggagtaagcagctttataagtactataatgaagaaatgagactgcccctattagaggtggatgatatctaatccaaacattatgagtagtactactcaggccccagagcccgtctatcaatggaccgccgacgaggcagttcaattccttaaggaatggaacttctcgttgggcattatactactctttattactatcatactacagttcggttacacgagccgtagcatgtttatttatgttgtgaaaatgataatcttgtggttaatgtggccactgactattgttttgtgtattttcaattgcgtgtatgcgctaaataatgtgtatcttggattttctatagtgtttactatagtgtccattgtaatctggatcatgtattttgtgaacagcataaggttgtttatcaggactggtagctggtggagcttcaaccccgaaacaaacaaccttatgtgtatagatatgaaaggtaccgtgtatgttagacccattattgaggattaccatacactaacagccactattattcgtggccacctctacatgcaaggtgttaagctaggcaccggtttctctttgtctgacttgcccgcttatgttacagttgctaaggtgtcacacctttgcacttataagcgcgcattcttagacaaggtagacggtgttagcggttttgctgtttatgtgaagtccaaggtcggaaattaccgactgccctcaaacaaaccgagtggcgcggacaccgcattgttgagaacctaatctaaactttaaggagagaatgaatcctatgtcggcgctcggtggtaacccctcgcgagaaagtcgggataggacactctctatcagaatggatgtcttgctgtcataacagatagagaaggttgtggcagaccctgtatcaattagttgaaagagattgcaaaatagagaatgtgtgagagaagttagcaaggtcctacgtctaaccataagaacggcgataggcgccccctgggaacagctcacatcagggtactattcctgcaatgccctagtaaatgaatgaagttgatcatggccaattggaagaatcacaaaaaaaaaaaaaaaaaaaacggccggtttaaacgctacagtccaagttccaagcgggatactagatgtataatgtccgccatgcagacgaaaccagtcggagattaccgagcattctatcacgtcggcgaccaatagtgagcttagggataacagggtaataaacgatccccgggaattcactggccgtcgttttacaacgtcgtgactgggaaaaccctggcgttacccaacttaatcgccttgcagcacatccccctttcgccagctggcgtaatagcgaagaggcccgcaccgatcgcccttcccaacagttgcgcagcctgaatggcgaatggcgatagatccggtggatgaccttttgaatgacctttaatagattatattactaattaattggggaccctagaggtccccttttttattttaaaaattttttcacaaaacggtttacaagcataaagctcggacggatcttttccgctgcataaccctgcttcggggtcattatagcgattttttcggtatatccatcctttttcgcacgatatacaggattttgccaaagggttcgtgtagactttccttggtgtatccaacggcgtcagccgggcaggataggtgaagtaggcccacccgcgagcgggtgttccttcttcactgtcccttattcgcacctggcggtgctcaacgggaatcctgctctgcgaggctggccggctaccgccggcgtaacagatgagggcaagcggatggctgatgaaaccaagccaaccaggaagggcagcccacctatcaaggtgtcgatgcaggggggggggaaagccacgttgtgtctcaaaatctctgatgttacattgcacaagataaaaatatatcatcatgaacaataaaactgtctgcttacataaacagtaatacaaggggtgttatgagccatattcaacgggaaacgtcttgctcaaggccgcgattaaattccaacatggatgctgatttatatgggtataaatgggctcgcgataatgtcgggcaatcaggtgcgacaatctatcgattgtatgggaagcccgatgcgccagagttgtttctgaaacatggcaaaggtagcgttgccaatgatgttacagatgagatggtcagactaaactggctgacggaatttatgcctcttccgaccatcaagcattttatccgtactcctgatgatgcatggttactcaccactgcgatccccggaaaaacagcattccaggtattagaagaatatcctgattcaggtgaaaatattgttgatgcgctggcagtgttcctgcgccggttgcattcgattcctgtttgtaattgtccttttaacagcgatcgcgtatttcgtctcgctcaggcgcaatcacgaatgaataacggtttggttgatgcgagtgattttgatgacgagcgtaatggctggcctgttgaacaagtctggaaagaaatgcataagtttttgccattctcaccggattcagtcgtcactcatggtgatttctcacttgataaccttatttttgacgaggggaaattaataggttgtattgatgttggacgagtcggaatcgcagaccgataccaggatcttgccatcctatggaactgcctcggtgagttttctccttcattacagaaacggctttttcaaaaatatggtattgataatcctgatatgaataaattgcagtttcatttgatgctcgatgagtttttctaatcagaattggttaattggttgtaacactggcagagcattacgctgacttgacgggacggcggctttgttgaataaatcgaacttttgctgagttgaaggatcagatcacgcatcttcccgacaacgcagaccgttccgtggcaaagcaaaagttcaaaatcaccaactggtccacctacaacaaagctctcatcaaccgtggctccctcactttctggctggatgatggggcgattcaggcctggtatgagtcagcaacaccttcttcacgaggcagacctcagacggtatcggatcgatcccccgatgtgtagcagtggcggaccatataggcagatcagaaggcgcggttctcctacatgagcttttcaattcaattcatcattttttttttattcttttttttgatttcggtttccttgaaatttttttgattcggtaatctccgaacagaaggaagaacgaaggaaggagcacagacttagattggtatatatacgcatatgtagtgttgaagaaacatgaaattgcccagtattcttaacccaactgcacagaacaaaaacctgcaggaaacgaagataaatcatgtcgaaagctacatataaggaacgtgctgctactcatcctagtcctgttgctgccaagctatttaatatcatgcacgaaaagcaaacaaacttgtgtgcttcattggatgttcgtaccaccaaggaattactggagttagttgaagcattaggtcccaaaatttgtttactaaaaacacatgtggatatcttgactgatttttccatggagggcacagttaagccgctaaaggcattatccgccaagtacaattttttactcttcgaagacagaaaatttgctgacattggtaatacagtcaaattgcagtactctgcgggtgtatacagaatagcagaatgggcagacattacgaatgcacacggtgtggtgggcccaggtattgttagcggtttgaagcaggcggcagaagaagtaacaaaggaacctagaggccttttgatgttagcagaattgtcatgcaagggctccctatctactggagaatatactaagggtactgttgacattgcgaagagcgacaaagattttgttatcggctttattgctcaaagagacatgggtggaagagatgaaggttacgattggttgattatgacacccggtgtgggtttagatgacaagggagacgcattgggtcaacagtatagaaccgtggatgatgtggtctctacaggatctgacattattattgttggaagaggactatttgcaaagggaagggatgctaaggtagagggtgaacgttacagaaaagcaggctgggaagcatatttgagaagatgcggccagcaaaactaaaaaactgtattataagtaaatgcatgtatactaaactcacaaattagagcttcaatttaattatatcagttattacccgggaatctcggtcgtaatgatttttataatgacgaaaaaaaaaaaattggaaagaaaaagctgggcgcgccggccggcccttttcatcacgtgctataaaaataattataatttaaattttttaatataaatatataaattaaaaatagaaagtaaaaaaagaaattaaagaaaaaatagtttttgttttccgaagatgtaaaagactctagggggatcgccaacaaatactaccttttatcttgctcttcctgctctcaggtattaatgccgaattgtttcatcttgtctgtgtagaagaccacacacgaaaatcctgtgattttacattttacttatcgttaatcgaatgtatatctatttaatctgcttttcttgtctaataaatatatatgtaaagtacgctttttgttgaaattttttaaacctttgtttatttttttttttcttcattccgtaactcttctaccttctttatttactttctaaaatccaaatacaaaacataaaaataaataaacacagagtaaattcccaaattattccatcattaaaagatacgaggcgcgtgtaagttacaggcaagcgatcggccggcccgggcatttaaatgcaggccgcgtacgcgtcgacggtaccgaattcgcttaaacgagctcatgttcgccggtgaacgcgttgaggaagccgggcagtgcctcggcaaaatccttgcgtgtagacaagacatctgcgtagcagttgtcctcaacaacgatgtcgaaatccaaatcggagtgctcatcgagtcctccgtgaacgtaagagccgccgatcagaagagcgcggaagcgaacatcggaagcgaccgcatcgcggatgcggttcaagaaagttgcatgagcttgtggaagtgtgctgagcataaatgattctcctagctgttctttgggtaagtacgccatcaggacgttgtgagtggcgcgatttttagcggctgaaatcagcccttgagcctgtcggcaagtcgcgtcatgaggtccatgcgctcatgcaggatcgccacgaccaacgcgggttcgcccgcacgcggcaggcaaaaaacgtagtggtgttcgcagcgggccatccgcagcgcgggaaagagttcgctcatgtccttaaacgggccttcgccggcggcaagcctggctatgccctgttccagcttagcgatatagcggcgcacctgcgccgcgccccactcccggcgcgtgtagcggatgatgccgcgtagatcggcttcggcctcagccgtgaggatgtaggccgtcaagcgcgatccccgctgagttcttcatcaagaatttcgccgacgctcttggtggacaccttgccggcaagcccatcgttgatgcggttccccagcatggttttcagttcctgccatgcctgatcggcatcagcgtcaccggggaacagacgttcgagggcgtattgcttaatggtcttgccctgcaaggcggccagggctttcaggctctggtgctgctggtccgtcatgtcgattgtcaggcggctcattggataacctccataaaatacacgtaaccacattagcacatatgtgggcgtgaggctacagcgcgaggcgcattaaggtcgggaaaatgcgctaggcgcatttaaattgcgtattgctgtaatgcgccatgccggctagactaggcccaaatgggtatacccaatttgaccaagggggacgcgatgagggcggccaagcactaccgacaacttctatccatcgacttcaacatcgaggcgctggccttcgtgcctggacccgacggcacacgcggccggcgcatccacgtcctggggcgcgaggtccgcgaccggcccggcctggtcgagtacctttcgccggcgttcggctcgcgggtggcgctggacggctactgcaaggccaatttcgatgcagtgctgcacctggcgtaccccgatcatcagcaatggggccacgcatgaagcgccgaagctacgccatgctgcgcgccgctgccgcgctggccgtcctggtcgttgcctcgccggcatgggccgagctgcgcggcgaggtcgtgcgcatcatcgacggcgacaccatcgacgtgctggtagacaagcagccggtgcgcgtgcgcctggtggacattgacgcgccggaaaagcggcaagccttcggcgaacgtgcgcgccaggcgctggccggcatggtgttccgccggcacgtcctggtcgacgagaaggacaccgaccgttacggccgcacgctgggcaccgtgtgggtcaacatggagctggccagccggccgccgcagccgcgcaacgtcaacgccgcgatggttcaccagggcatggcgtgggcctatcgcttccacggccgcgcggccgaccctgaaatgctgcggctcgaacaggaggcgcgaggcaagcgcgtcggcctctggtccgatccgcacgccgtcgagccgtggaaatggcgacgcgagagcaacaaccggagggacgaaggttgaaggtcgcccgcatctacctgcgcgccagtacggacgagcagaatcttgaacgccaggagagccttgtagcggccacgcgggccgccgggtactacgtcgccggcatctaccgcgagaaggcgtccggcgcacgcgccgaccggcccgagctgctgcgcatgatcgcggacctgcaacctggtgaagtcgtcgttgcggagaagatcgaccgcatcagccgcttgccgttggccgaggccgagcgcctggttgcgtcgatccgggccaaaggggccaagctggccgtgcctggcgtggtggacctgtcggagctggccgccgaggcgaacggagtggcgaaaatcgttctggaatccgtccaggacatgcttttgaagctcgccttgcagatggcccgcgacgactacgaggatcggcgcgagcgtcaacgtcagggtgtccagttggcgaaggccgccggccgctacaccggccgcaaacgtgacgccggcatgcacgaccgcatcatcacgcttcgctccggcggatcgagcattgccaagacggccaagctggtcggatgcagcccgagccaggtcaaacgagtgtgggcggcctggaacgcgcagcagcaaaaataaagccgggcagtgcccggcttttctcaccttttcgcgtcccgcagggccgctgcgagcgccctacctagatcctcgctttccccctcggtgtagtccggccagggcacgaagggcgcggatgcgaacctgttgagcaggtacgccttcgggcagcggtagaccaccggcgagttcgccttttcatcccaccgggccaggatcacgtccgcatcgcagtgcatgtccttcacctggtcgcggaagaagccgaaggccaccatgccgctatgttcgccgaggaacgccagttgcttcgcgctggcgatcgcgccgacgccgccggccaaaaccgacgccatcacccagccgacgaaccagaagctggcatgcttgcggttgaccaccgcacgcgcagccgcgaccaggacaacggccaagctgccgaccagggccatgacgaccgtgatccggccgttgtggaaagcgatgggcttgccagcgtccgcttgcacggcgtcgtaaatgctggacccgatgggcgcgcacatcagcacgacaggcagcagcaccaggaacatcgtccgcgtccattgcgcgagtgccttgcggcgttcgccggcggcaagcgcctccatcatcggcgtgaagcccaacagggccaccgcagccgccaagccggcaacgatgccgcaggcgattacatacatacatcctccctaatgcgccttgcgcacggttgtagtcagagtccgcggtggggcgataagctcatgaccaaaatcccttaacgtgagttttcgttccactgagcgtcagaccccgtagaaaagatcaaaggatcttcttgagatcctttttttctgcgggggatcaggaccgctgccggagcgcaacccactcactacagcagagccatgtagacaacatcccctccccctttccaccgcgtcagacgcccgtagcagcccgctacgggctttttcatgccctgccctagcgtccaagcctcacggccgcgctcggcctctctggcggccttctggcgctcctgctgcggcgtccgctcgtgggccgtggcgcgggtccgcgcgccggcctcgtgcgcctggcgctcgcgggcgaggtccagggcggccgtcttcacgttctgccttgcgcagatgagatagatcgatctagcgtggactcaaggctctcgcgaatggctcgcgttggaaactttcattgacacttgaggggcaccgcagggaaattctcgtccttgcgagaaccggctatgtcgtgctgcgcatcgagcctgcgcccttggcttgtctcgcccctctccgcgtcgctacggggcttccagcgcctttccgacgctcaccgggctggttgccctcgccgctgggctggcggccgtctatggccctgcaaacgcgccagaaacgccgtcgaagccgtgtgcgagacaccgcggccgccggcgttgtggatacctcgcggaaaacttggccctcactgacagatgaggggcggacgttgacacttgaggggccgactcacccggcgcggcgttgacagatgaggggcaggctcgatttcggccggcgacgtggagctggccagcctcgcaaatcggcgaaaacgcctgattttacgcgagtttcccacagatgatgtggacaagcctggggataagtgccctgcggtattgacacttgaggggcgcgactactgacagatgaggggcgcgatccttgacacttgaggggcagagtgctgacagatgaggggcgcacctattgacatttgaggggctgtccacaggcagaaaatccagcatttgcaagggtttccgcccgtttttcggccaccgctaacctgtcttttaacctgcttttaaaccaatatttataaaccttgtttttaaccagggctgcgccctgtgcgcgtgaccgcgcacgccgaaggggggtgcccccccttctcgaaccctcccggcccgctaacgcgggcctcccatccccccaggggctgcgcccctcggccgcgaacggcctcaccccaaaaatggcagcgctggcagtccttgccattgccgggatcggggcagtaacgggatgggcgatcagcccgagcgcgacgcccggaagcattgacgtgccgcaggtgctggcatcgacattcagcgaccaggtgccgggcagtgagggcggcggcctgggtggcggcctgcccttcacttcggccgtcggggcattcacggacttcatggcggggccggcaatttttaccttgggcattcttggcatagtggtcgcgggtgccgtgctcgtgttcgggggtgaattaattccccggatcgatccgtcagcttcacgctgccgcaagcactcagggcgcaagggctgctaaaggaagcggaacacgtagaaagccagtccgcagaaacggtgctgaccccggatgaatgtcagctactgggctatctggacaagggaaaacgcaagcgcaaagagaaagcaggtagcttgcagtgggcttacatggcgatagctagactgggcggttttatggacagcaagcgaaccggaattgccagctggggcgccctctggtaaggttgggaagccctgcaaagtaaactggatggctttcttgccgccaaggatctgatggcgcaggggatcaagatcgacggatcgatccggggaattaattccggggcaatcccgcaaggagggtga

SEQ ID NO: 41 - DNA, 29494 bp, Artificial Sequence
  Synthesis optimized sequence E-protein and ORF6 double deletion
caaatataacgaaaggctcagtcgaaagactgggcctttcgttttatctgttgtttgtcgtaatacgactcactatagggattaaaggtttataccttcccaggtaacaaaccaaccaactttcgatctcttgtagatctgttctctaaacgaactttaaaatctgtgtggctgtcactcggctgcatgcttagtgcactcacgcagtataattaataactaattactgtcgttgacaggacacgagtaactcgtctatcttctgcaggctgcttacggtttcgtccgtgttgcagccgatcatcagcacatctaggtttcgtccgggtgtgaccgaaaggtaagatggagagccttgtccctggtttcaacgagaaaacacacgtccaactcagtttgcctgttttacaggttcgcgacgtgttagtacgtggttttggagattcagtggaagaagtcttatcagaggcacgtcaacatcttaaagatggcacttgtggcttagtagaagttgaaaaaggcgttttgcctcaacttgaacagccctatgtgttcatcaaacgttctgatgctagaactgcacctcatggtcatgttatggttgagctggtagcagaattagaaggtattcagtacggtcgtagtggtgagacattaggtgttttagttcctcatgtgggcgaaataccagtggcttaccgcaaagttcttcttagaaagaacggtaataaaggagctggtggccatagttacggcgctgatttaaagtcatttgacttaggcgacgagcttggcactgatccttatgaagatttccaagaaaactggaacactaaacatagcagtggtgttacccgtgaactcatgcgtgagttaaatggaggtgcatacactcgctatgtcgataacaacttctgtggacctgatggttaccctcttgagtgcattaaagaccttctagcacgtgctggtaaagcttcatgcactttgtccgaacaactggactttattgacactaagaggggtgtatactgctgccgtgaacatgagcatgaaattgcttggtacacggaacgttctgaaaagagctatgaattgcagacaccttttgaaattaaactggcaaagaaatttgacaccttcaatggggaatgtccaaattttgtatttcccctcaattccataatcaagactattcaaccaagggttgaaaagaaaaagcttgatggctttatgggtagaattcgatctgtctatccagttgcgtcaccaaatgaatgcaaccaaatgtgcctttcaactctcatgaagtgtgatcattgtggtgaaacttcatggcagacgggcgattttgttaaagccacttgcgaattttgtggcactgagaatttgactaaagaaggtgccactacttgtggttacttaccccaaaatgctgttgttaaaatttactgtccagcatgtcacaattcagaagtaggacctgagcatagtcttgccgaataccataatgaatctggcttgaaaaccattcttcgtaagggtggtcgcactattgcttttggaggatgtgtgttctcttatgttggttgccataacaagtgtgcttattgggttccacgtgcttcagctaacataggttgtaaccatacaggtgttgttggagaaggttccgaaggtcttaatgacaaccttcttgaaatactccaaaaagagaaagtcaacatcaatattgttggtgactttaaacttaatgaagagatcgccattattttggcatctttttctgcttccacaagtgcttttgtggaaactgtgaaaggtttggattataaagcattcaaacagattgttgaatcctgtggtaattttaaggttacaaagggaaaagctaaaaaaggtgcctggaatattggtgaacagaaatcaatactgagtcctctttatgcatttgcatcagaggctgctcgtgttgtacgatcaattttctcccgcactcttgaaactgctcaaaattctgtgcgtgttttacagaaggccgctataacaatactagatggaatttcacagtattcactgagactcattgatgctatgatgttcacatctgatttggctactaacaatctagttgtaatggcctacattacaggtggtgttgttcagttgacttcgcagtggctaactaacatctttggcactgtttatgaaaaactcaaacccgtccttgattggcttgaagagaagtttaaggaaggtgtagagtttcttagagacggttgggagattgttaaattcatctcaacctgtgcttgtgaaattgtcggtggacaaattgtcacctgtgctaaggaaattaaggagagtgttcagacattctttaagcttgtaaacaagtttttggctttgtgtgctgactctatcattattggtggagctaaacttaaagccttgaatttaggtgaaacatttgtcacgcactcaaagggattgtacagaaagtgtgttaaatccagagaagaaactggcctactcatgcctctaaaagccccaaaagaaattatcttcttagagggagaaacacttcccacagaagtgttaacagaggaagttgtcttgaaaactggtgatttacaaccattagaacaacctactagtgaagctgttgaagctccattggttggtacaccagtttgtattaacgggcttatgttgctcgaaatcaaagacacagaaaagtactgtgcccttgcacctaatatgatggtaacaaacaataccttcacactcaaaggcggtgcaccaacaaaggttacttttggtgatgacactgtgatagaagtgcaaggttacaagagtgtgaatatcacttttgaacttgatgaaaggattgataaagtacttaatgagaagtgctctgcctatacagttgaactcggtacagaagtaaatgagttcgcctgtgttgtggcagatgctgtcataaaaactttgcaaccagtatctgaattacttacaccactgggcattgatttagatgagtggagtatggctacatactacttatttgatgagtctggtgagtttaaattggcttcacatatgtattgttctttctaccctccagatgaggatgaagaagaaggtgattgtgaagaagaagagtttgagccatcaactcaatatgagtatggtactgaagatgattaccaaggtaaacctttggaatttggtgccacttctgctgctttacaacctgaagaagaacaagaagaagattggttagatgatgatagtcaacaaactgttggtcaacaagacggcagtgaggacaatcagacaactactattcaaacaattgttgaggttcaacctcaattagagatggaacttacaccagttgttcagactattgaagtgaatagttttagtggttatcttaaacttactgacaatgtatacatcaagaatgcagacattgtggaagaagctaaaaaggtaaaaccaacagtggttgttaatgcagccaatgtttaccttaaacatggaggaggtgttgcaggagccttaaataaggctactaacaatgccatgcaagttgaatctgatgattacatagctactaatggaccacttaaagtgggtggtagttgtgttttaagcggacacaatcttgctaaacactgtttacatgttgtcggcccaaatgttaacaaaggtgaagatattcaacttcttaagagtgcttatgaaaattttaaccagcacgaagttctacttgcaccattattatcagctggtatttttggtgctgaccctatacattctttaagagtttgtgtagatactgttcgcacaaatgtctacttagctgtctttgataaaaatctctatgacaaacttgtttcaagctttttggaaatgaagagtgaaaagcaagttgaacaaaagatcgctgagattcctaaagaggaagttaagccatttataactgaaagtaaaccttcagttgaacagagaaaacaagatgataagaagatcaaagcttgtgttgaagaagttacaacaactctggaagaaactaagttcctcacagaaaacttgctcctttatatcgacattaatggcaatcttcatccagattctgccactcttgttagtgacattgacatcactttcttaaagaaagatgctccatatatagtgggtgatgttgttcaagagggtgttttaactgctgtggttatacctactaaaaaggctggtggcactactgaaatgctagcgaaagctttgagaaaagtgccaacagacaattatataaccacttacccgggtcagggtttaaatggttacactgtagaggaggcaaagacagtgcttaaaaagtgtaaaagtgccttttacattctaccatctattatctctaatgagaagcaagaaattcttggaactgtttcttggaatttgcgagaaatgcttgcacatgcagaagaaacacgcaaattaatgcctgtctgtgtggaaactaaagccatagtttcaactatacagcgtaaatataagggtatcaagatacaagagggtgtggttgattatggtgctagattttacttttacaccagtaaaacaactgtagcgtcacttatcaacacacttaacgatctaaatgaaactcttgttacaatgccacttggctatgtaacacatggcttaaatttggaagaagctgctcggtatatgagatctctcaaagtgccagctacagtttctgtttcttcacctgatgctgttacagcgtataatggttatcttacttcttcttctaaaacacctgaagaacattttattgaaaccatctcacttgctggttcctataaagattggtcctattctggacaatctacacaactaggtatagaatttcttaagagaggtgataaaagtgtatattacacgtccaatcctaccacattccacctagatggtgaagttatcacctttgacaatcttaagacacttctttctttgagagaagtgaggactattaaggtgtttacaacagtagacaacattaacctccacacgcaagttgtggacatgtcaatgacatatggacaacagtttggtccaacttatttggatggagctgatgttactaagataaaacctcataactcacatgaaggtaaaacattttacgttttgcctaatgatgacactctacgtgttgaggcttttgagtactaccacacaactgatcctagttttctgggtaggtacatgtcagcattaaatcacactaaaaagtggaaatacccacaagttaatggtttaacttcgattaaatgggcagataacaactgttatcttgccactgcattgttaacactccaacaaatagagttgaagtttaatccacctgctctacaagatgcttattacagagcaagggctggtgaagctgctaacttttgtgcacttatcttagcctactgtaataagacagtaggtgagttaggtgatgttagagaaacaatgagttacttgtttcaacatgccaatttagattcttgcaaaagagtcttgaacgtggtgtgtaaaacttgtggacaacagcagacaacccttaagggtgtagaagctgttatgtacatgggcacactttcttatgaacaattcaagaaaggtgttcagataccttgtacgtgtggtaaacaagctacaaaatatctagtacaacaggagtcaccttttgttatgatgtcagcaccacctgctcagtatgaacttaagcatggtacatttacttgtgctagtgagtacactggtaattaccagtgtggtcactataagcatataacttctaaggaaactttgtattgcatagacggtgctttacttacaaagtcctcagaatacaaaggtcctattacggatgttttctacaaagaaaacagttacacaacaaccataaaaccagttacttataagttggatggtgttgtttgtacagaaattgaccctaagttggacaattattataagaaggacaactcttatttcacagagcaaccaattgatcttgtaccaaaccaaccatatccaaacgcaagcttcgataattttaagttcgtatgcgataatatcaaatttgctgatgatctcaaccagttaactggttataagaaacctgcttcaagagagcttaaagttacatttttccctgacttaaatggtgatgtggtggctattgattataaacactacacaccctcttttaagaaaggagctaaattgttacataagcctattgtttggcatgttaacaatgcaactaataaagccacgtataaaccaaatacctggtgtatacgttgtctttggagcacaaaaccagttgaaacatcaaattcgtttgatgtactgaagtcagaggacgcgcagggaatggataatcttgcatgtgaagatctaaaaccagtctctgaagaagtagtggaaaatcctaccatacagaaagacgttcttgagtgtaatgtgaaaactaccgaagttgtaggagacattatacttaaaccagcaaataatagtttgaagatcacagaagaggttggccacacagatctaatggctgcttatgtagacaattctagtcttactattaagaaacctaatgaactctctagagtattaggtttgaaaacccttgctactcatggtttagctgctgttaatagtgtcccttgggatactatagctaattatgctaagccttttcttaacaaagttgttagtacaactactaacatagttacacggtgtcttaatcgtgtttgtactaattatatgccttacttctttactttattgctacaattgtgtacttttactagaagtacaaattctagaatcaaggcatctatgccgactactatagcaaagaatactgttaagagtgtcggtaaattttgtctagaggcttcatttaattatctcaagtcacctaacttttctaagctgataaacattatcatctggtttttgctattaagtgtttgcctaggttctttaatctactcaaccgctgctttaggtgttttaatgtctaatttaggcatgccttcttactgtactggttacagagaaggctatttgaactctactaatgtcactattgcaacctactgtactggatctataccttgtagtgtttgtcttagtggtttagattctttagacacctatccttctcttgaaactatacagattaccatttcatctttcaaatgggatttaactgcttttggcttagttgcagagtggtttttggcatatattcttttcactaggtttttctatgtacttggattggctgcaatcatgcaattgtttttcagctattttgcagtccattttattagtaactcttggcttatgtggcttataattaatcttgtgcagatggccccgatttcagctatggttagaatgtacatcttctttgcctcattttattatgtgtggaaaagttatgtgcatgttgtagacggttgtaattcatcaacttgtatgatgtgttacaaacgtaatagagcaacaagagtcgaatgtacaactattgttaatggtgttagaaggtccttttatgtctatgctaatggaggtaaaggcttttgcaaactacacaattggaattgtgttaattgtgatacattctgtgctggtagtacatttattagtgatgaagttgcgagagacttgtcactacagtttaaaagaccaataaatcctactgaccaatcttcttacatcgttgatagtgttacagtgaagaatggttccatccatctttactttgataaagctggtcaaaagacttatgaaagacattctctctctcattttgttaacttagacaacctgagagctaataacactaaaggttcattgcctattaatgttatcgttttcgacggtaaatcaaaatgtgaagaatcatctgcaaaatcagcgtctgtttactacagtcagcttatgtgtcaacctatactgttactagatcaggcattagtgtctgatgttggtgatagtgcggaagttgcagttaaaatgtttgatgcttacgttaatacgttttcatcaacttttaacgtaccaatggaaaaactcaaaacactagttgcaactgcagaagctgaacttgcaaagaatgtgtccttagacaatgtcttatctacgtttatttcagcagctcggcaagggtttgttgattcagatgtagaaactaaagatgttgttgaatgtcttaaattgtcacatcaatctgacatagaagttactggcgatagttgtaataactatatgctcacctataacaaagttgaaaacatgacaccccgtgaccttggtgcttgtattgactgtagtgctagacatattaatgcgcaggtagcaaaaagtcacaacattgctttgatatggaacgttaaagatttcatgtcattgtctgaacaactacgaaaacaaatacgtagtgctgctaaaaagaataacttacccttcaagttgacatgtgcaactactagacaagttgttaatgttgtaacaacaaagatagcacttaagggtggtaaaattgtgaataactggttgaagcagcttattaaagttacacttgtgttcctttttgttgctgctattttctatctgataacacctgttcatgtcatgtctaaacatactgacttttcaagtgaaatcataggatacaaggctattgatggtggtgtcactcgtgacatagcatctacagatacttgttttgctaacaaacatgctgattttgacacatggtttagccagcgtggtggtagttatactaatgacaaagcttgcccattgattgctgcagtcataacaagagaagtgggttttgtcgttcctggtttgcctggaacgatattacgcacaactaatggtgactttttgcatttcttacctagagtttttagtgcagttggtaacatctgttacacaccatcaaaacttatagagtacactgactttgcaacatcagcttgtgttttggctgctgaatgtacaatttttaaagacgcttctggtaagccagtaccatattgttatgataccaatgtactagaaggttctgttgcttatgaaagtttacgccctgacacacgttatgtgctcatggatggctctattattcaatttcctaacacctaccttgaaggttctgtaagagtggtaacaacttttgattctgagtactgtaggcacggcacttgtgaaagatcagaagctggtgtttgtgtatctactagtggtagatgggtacttaacaacgattattacagatctttaccaggagttttctgtggtgtagatgctgtaaatttgcttactaacatgtttacaccactaattcaacctattggtgctttggacatatcagcatctatagtagctggtggtattgtagctatcgtagtaacatgccttgcctactattttatgaggtttagacgtgcttttggtgaatacagtcatgtagttgcctttaatactctcctattccttatgtcattcactgtactctgtttaacaccagtttactcattcttacctggtgtttattctgttatttacctgtacttgacattttatctgactaatgatgtttcttttctcgcacatattcagtggatggttatgttcacacctttagtacctttctggataacaattgcttacatcatttgtatttccacaaagcatttctattggttctttagtaattacctaaagagacgtgtagtctttaatggtgtttcctttagtacttttgaagaagctgcgctgtgcacctttttgttaaataaggagatgtatctaaagttgcgtagtgatgtgctattacctcttacgcaatataatagatacttagctctttataacaagtacaagtatttcagtggagcaatggatacaactagctacagagaagctgcttgttgtcatctcgcaaaggctctcaatgacttcagtaactcaggttctgatgttctttaccaaccaccacaaacctctatcacctcagctgttttgcagagtggttttagaaaaatggcattcccatctggtaaagttgagggttgtatggtacaagtaacttgtggtacaactacacttaacggtctttggcttgatgacgtagtttactgtccaagacatgtgatctgcacctctgaagatatgcttaaccctaattatgaagatctactcatccgtaagtctaatcataacttcttggtacaggctggtaatgttcaactcagggttattggacattctatgcaaaattgtgtacttaagcttaaggttgatacagccaatcctaagacacctaagtataagtttgttcgcattcaaccaggacagactttttcagtgttagcttgttacaatggttcaccatctggtgtttaccaatgtgctatgaggcccaatttcactattaagggttcattccttaatggttcatgtggtagtgttggttttaacatagattatgactgtgtctctttttgttacatgcaccatatggaattaccaactggagttcatgctggcacagacttagaaggtaacttttatggaccttttgttgacaggcaaacagcacaagcagctggtacagatacaactattacagttaatgttcttgcttggttgtacgctgctgttataaatggagacaggtggtttctcaatcgatttaccacaactcttaatgactttaaccttgtggctatgaagtacaattatgaacctctaacacaagaccatgttgacatactaggacctctttctgctcaaactggaattgccgttttagatatgtgtgcttcattaaaagaacttctgcaaaatggtatgaatggacgtaccatattgggtagtgctttattagaagatgagtttacaccttttgatgttgttagacaatgctcaggtgttactttccaaagtgcagtgaaaagaacaatcaagggtacacaccactggttgttactcacaattttgacttcacttttagttttagtccagagtactcaatggtctttgttctttttcttctacgaaaatgcctttttaccttttgctatgggtattattgctatgtctgcttttgcaatgatgtttgtcaaacataagcatgcatttctctgtttgtttttgttaccttctcttgccactgtagcttactttaatatggtctacatgcctgctagttgggtgatgcgtattatgacatggttggatatggttgatactagtttgtctggttttaagctaaaagactgtgttatgtatgcatcagctgtagtgttactaatccttatgacagcaagaactgtgtatgatgatggtgctaggagagtgtggacacttatgaatgtcttgacactcgtttataaagtttactatggcaacgctttagatcaagccatttccatgtgggctcttataatctctgttacttctaactactcaggtgtagttacaactgtcatgtttttggccagaggtattgtttttatgtgtgttgagtattgccctattttcttcataactggtaatacacttcagtgtataatgctagtctattgtttcttaggctatttttgtacttgttacttcggcctcttttgtttactcaaccgctactttagactgactcttggtgtttatgattacttagtgtctacacaggagtttagatatatgaattcacagggactactcccacccaagaatagcatagatgccttcaaactcaacattaaattgttgggtgttggtggcaaaccttgtatcaaagtagccactgtacagtctaaaatgtcagatgtaaagtgcacatcagtagtcttactctcagttttgcaacaactcagagtagaatcatcatctaaattgtgggctcaatgtgtccagttacacaatgacattctcttagctaaagatactactgaagcctttgaaaaaatggtttcactactttctgttttgctttccatgcagggtgctgtagacataaacaagctttgtgaagaaatgctggacaacagggcaaccttacaagctatagcctcagagtttagttcccttccatcatatgcagcttttgctactgctcaagaagcttatgagcaggctgttgctaatggtgattctgaagttgttcttaaaaagttgaagaagtctttgaatgtggctaaatctgaatttgaccgtgatgcagccatgcaacgtaagttggaaaagatggctgatcaagctatgacccaaatgtataaacaggctagatctgaggacaagagggcaaaagttactagtgctatgcagacaatgcttttcactatgcttagaaagttggataatgatgcactcaacaacattatcaacaatgcaagagatggttgtgttcccttgaacataatacctcttacaacagcagccaaactaatggttgtcataccagactacaacacatataagaatacgtgtgatggtacaacatttacttatgcatcagcattgtgggaaatccaacaggttgtagatgcagatagtaaaattgttcagcttagtgaaattagtatggacaattcacctaatttagcatggcctcttattgtaacagctttaagggccaattctgctgtcaaattacagaataatgagcttagtcctgttgcactaagacaaatgtcttgtgctgccggtactacacaaactgcttgcactgatgacaatgcgttagcttactacaacacaacaaagggaggtaggtttgtacttgcactgttatccgatttacaggatttgaaatgggctagattccctaagagtgatggaactggtactatctatacagaactggaaccaccttgtaggtttgttacagacacacctaaaggtcctaaagtgaagtatctttacttcatcaaaggattaaacaacctaaatagaggtatggtacttggtagtttagctgccacagtacgtttacaagctggtaatgcaacagaagttcctgctaattcaactgtactttctttctgtgcttttgctgtagatgctgctaaagcttacaaagattatctagctagtgggggacaaccaatcactaattgtgttaagatgttgtgtacacacactggtactggtcaggcaataacagttacaccggaagccaatatggatcaagaatcctttggtggtgcatcgtgttgtctgtactgccgttgtcatatagatcatccaaatcctaaaggattttgtgacttaaaaggtaagtatgtacaaatacctacaacttgtgctaatgaccctgtgggttttacacttaaaaacacagtctgtaccgtctgcggtatgtggaaaggttatggttgtagttgtgatcaactccgcgaacccatgcttcagtcagctgatgcacaatcgtttttaaacgggtttgcggtgtaagtgcagcccgtcttacaccgtgcggcacaggcactagtactgatgtcgtatatagagcttttgacatctacaatgataaagtagctggttttgctaagttcctaaaaactaattgttgtcgcttccaagaaaaggacgaagatgacaatctcattgattcttactttgtagttaagagacacactttctctaactaccaacatgaagaaacaatttacaacctgcttaaggattgtccagctgttgctaaacatgacttctttaagtttagaatagacggtgacatggtaccacatatatcacgtcaacgtcttactaaatacacaatggcagacctcgtctatgctttaaggcattttgatgaaggtaattgtgacacattaaaagaaatacttgtcacatacaattgttgtgatgatgactacttcaataaaaaggactggtatgattttgtagaaaacccagatatattacgcgtatacgccaacttaggtgaacgtgtacgccaagctttgttaaaaacagtacagttctgtgatgccatgcgaaatgctggtattgttggtgtactgacattagataatcaagatctcaatggtaactggtatgactttggtgatttcatacaaaccacgccaggtagtggagttcctgttgtagactcttattattcattgctcatgcctatattaaccttgaccagggctttaactgcagagtcacatgttgacactgacttaacaaagccttacattaagtgggatttgttaaaatacgacttcacggaagagaggttaaaactctttgaccgttattttaaatactgggatcagacataccacccaaattgtgttaactgtttggatgacagatgcattctgcattgtgcaaactttaatgttctgttctctacagtgttcccacctacaagttttggaccactagtgagaaaaatatttgttgatggtgttccatttgtagtttcaactggataccacttcagagagctaggtgttgtacataatcaggatgtaaacttacatagctctagacttagttttaaggaattacttgtgtatgctgctgatcctgctatgcatgctgcttctggtaatctattactagataaacgcactacgtgcttttcagtagctgcacttactaacaatgttgcttttcaaactgtcaaacccggtaattttaacaaggacttctatgactttgctgtgtctaagggtttctttaaggaaggaagttctgttgaattaaaacacttcttctttgctcaggatggtaatgctgctatcagcgattatgactactatcgttataatctaccaacaatgtgtgatatcagacaactactatttgtagttgaagttgttgataagtactttgattgttacgatggtggctgtattaatgctaaccaagtcatcgtcaacaacctagacaaatcagctggttttccatttaataaatggggtaaggctagactttattatgattccatgagttatgaggatcaagatgcacttttcgcatatacaaaacgtaatgtcatccctactataactcaaatgaaccttaagtatgccattagtgcaaagaatagagctcgcaccgtagctggtgtctctatctgtagtactatgaccaatagacagtttcatcaaaaattactcaagtcaatagccgccactagaggagctactgtagtaattggaacaagcaaattctatggtggttggcacaacatgctcaaaactgtttatagtgatgtagaaaaccctcaccttatgggttgggattatcctaaatgtgatagagccatgcctaacatgcttagaattatggcctcacttgttcttgctcgcaaacatacaacgtgttgtagcttgtcacaccgtttctatagattagctaatgagtgtgctcaagtattgagtgaaatggtcatgtgtggcggttcactatatgttaaaccaggtggaacctcatcaggagatgccacaactgcttatgctaatagtgtgtttaacatttgtcaagctgtcacggccaatgttaatgcacttttatctactgatggtaacaaaattgccgataagtatgtccgcaatttacaacacagactttatgagtgtctctatagaaatagagatgttgacacagactttgtgaatgagttttacgcatatttgcgtaaacatttctcaatgatgatactctctgacgatgctgttgtgtgtttcaatagcacttatgcatctcaaggtctagtggctagcataaagaactttaagtcagttctttactatcaaaacaacgtttttatgtctgaagcaaaatgttggactgagactgaccttactaaaggacctcatgaattttgctctcaacatacaatgctagttaaacagggtgatgattatgtgtaccttccttacccagatccatcaagaatcctaggtgccggttgttttgtagatgatatcgtaaaaacagatggtacacttatgattgaacggttcgtgtctttagctatagatgcttacccacttactaaacatcctaatcaggagtatgctgatgtctttcatttgtacttacaatacatacgtaagctacatgatgagttaacaggacacatgttagacatgtattctgttatgcttactaatgataacacttcaaggtattgggaacctgagttttatgaggctatgtacacaccgcatacagtcttacaagctgttggtgcttgtgttctttgcaattcacagacttcattaagatgtggtgcttgcatacgtagaccattcttatgttgtaaatgctgttacgaccatgtcatctcaacatcacataaattagtcttgtctgttaatccgtatgtttgcaatgctccaggttgtgatgtcacagatgtgactcaactttacttaggaggtatgagctattactgtaagtcacataaaccacccattagttttccattgtgtgctaatggacaagtttttggtctctacaagaatacatgtgttggtagcgataatgttactgactttaatgcaattgcaacatgtgactggacaaatgctggtgattacattttagctaacacctgtactgaaagactcaagctttttgcagcagaaacgctcaaagctactgaggagacatttaaactgtcttatggtattgctactgtacgtgaagtgctgtctgacagagaattacatctttcatgggaagttggtaaacctagaccaccacttaaccgaaattatgtctttactggttatcgtgtaactaaaaacagtaaagtgcaaatcggagagtacacctttgaaaaaggtgactatggtgatgctgttgtttaccgaggtacaacaacttacaaactcaacgttggtgattattttgtgctgacatcacatacagtaatgccattaagtgcacctacactagtgccacaagagcactatgttagaattactggcttatacccaacactcaatatctcagatgagttttctagcaatgttgcaaattatcaaaaggttggtatgcaaaagtattctacactccagggaccacctggtactggtaaaagtcattttgctattggtctagctctctactacccttctgctcgcatagtatatacagcttgctctcatgcagctgttgatgcactatgtgagaaggcattaaaatatttgcccatagacaaatgtagtagaattatacctgcacgtgctcgtgtagagtgttttgataaattcaaggtgaattcaacattagaacagtatgtcttttgtactgtaaatgcattgcctgagacgacagcagatatagttgtctttgatgaaatttcaatggccacaaattatgatttgagtgttgtcaatgccagattacgtgctaagcactatgtgtacattggtgatcctgctcaattacctgcaccacgcacattactaactaagggtacactagaaccagaatatttcaattcagtgtgtagacttatgaaaactataggtccagacatgttcctcggaacttgtcgtagatgtcctgctgaaattgttgacactgtgagtgctttggtttatgataataagcttaaggcacataaagacaaatcagctcaatgctttaaaatgttctacaagggtgttatcacgcatgatgtttcatctgcaattaacaggccacaaataggcgtggtaagagaattccttacacgtaaccctgcttggagaaaagctgtctttatttcaccttacaattcccagaatgctgtagcctcaaagattttgggactaccaactcaaactgttgattcatcacagggctcagaatatgactatgtcatattcactcaaaccactgaaacagctcactcttgtaatgtaaacagattcaacgttgctattaccagagcaaaagtaggcatactttgcataatgtctgatagagacctttatgacaagttgcaatttacaagtcttgaaattccacgtaggaatgtggcaactttacaagctgaaaatgtaacaggactctttaaagattgtagtaaggtaatcactgggttacatcctacacaggcacctacacacttaagtgttgatactaaattcaaaactgaaggtttatgtgttgacatacctggcatacctaaggacatgacctatagaagattaatctctatgatgggtttcaaaatgaattaccaggttaatggttaccctaacatgtttatcacccgcgaagaagctataagacatgtacgtgcatggattggcttcgatgtcgaaggttgtcatgctactagagaagctgttggtaccaatttacctttacagctaggtttttctacaggtgttaacctagttgctgtacctacaggttatgttgatacacctaataatacagatttttccagagttagtgctaaaccaccgcctggagatcaatttaaacacctcataccacttatgtacaaaggacttccttggaatgtagtgcgtataaagattgtccaaatgttaagtgacacacttaaaaatctctctgacagagtcgtatttgtcttatgggcacatggctttgagttgacatctatgaagtattttgtgaagatcggacctgagcgcacatgttgtctatgtgatagacgtgctacatgcttttccactgcttcagacacttatgcctgttggcatcattctattggatttgattacgtctataatccgtttatgattgatgttcaacaatggggttttacaggtaacctacaaagcaaccatgatctgtattgtcaagtccatggtaatgcacatgtagctagttgtgatgcaatcatgactaggtgtctagctgtccacgagtgctttgttaagcgtgttgactggactattgaatatcctataatcggtgatgaactgaagattaatgcggcttgtagaaaggttcaacacatggttgttaaagctgcattattagcagacaaattcccagttcttcacgacattggtaaccctaaagctattaagtgtgtacctcaagctgatgtagaatggaagttctatgatgcacagccttgtagtgacaaagcttacaaaatagaagaactgttctattcttatgccacacattctgacaaattcacagatggtgtatgcctattttggaattgcaatgtcgatagatatcctgctaattccattgtttgtagatttgacactagagtgctatctaaccttaacttgcctggttgtgatggtggcagtttgtatgtaaataagcatgcattccacacaccagcttttgataaaagtgcttttgttaatctaaagcaacttccatttttctattactctgacagtccatgtgagtctcatggaaaacaagtagtgtcagatatagattatgtaccactaaagtctgctacgtgtataacacgttgcaatttaggtggtgctgtctgtagacatcatgctaatgagtacagattgtatctcgatgcttataacatgatgatctcagctggctttagcttgtgggtttacaaacaatttgatacctataacctctggaacacttttacaagacttcagagtttagaaaatgtggcttttaatgttgtaaataagggacactttgatggacaacagggtgaagtaccagtttctatcattaacaacactgtttacacaaaagttgatggtgttgatgtagaattgtttgagaacaaaaccacattacctgttaatgtagcatttgagctttgggctaagcgcaacattaaaccagtaccagaggtgaaaatactcaataatttgggtgtggacattgctgctaatactgtgatctgggactacaaaagagatgctccagcacatatatctactattggtgtttgttctatgactgacatagccaagaaaccaactgaaacgatttgtgcaccactcactgtcttttttgatggtagagttgatggtcaagtagacttatttagaaatgcccgtaatggtgttcttattacagaaggtagtgttaaaggtttacaaccatctgtaggtcccaaacaagctagtcttaatggagtcacattaattggagaagccgtaaaaacacagttcaattattacaagaaagtggatggtgttgtccaacaattacctgaaacttactttactcagagtagaaacttacaggaatttaagcccaggagtcaaatggaaattgatttcttagaacttgctatggatgaattcattgaacggtataaattagaaggctatgccttcgaacatatcgtttatggagattttagtcatagtcagttaggtggtttacatctactgattggactagctaaacgttttaaggaatcaccttttgaacttgaagattttattcctatggacagtacagttaaaaactacttcataacagatgcgcaaacaggttcatctaagtgtgtgtgttctgttattgatcttttacttgatgacttcgttgaaataataaagtcccaagatttatctgtagtttctaaggttgtcaaagtgactattgactatacagaaatctcatttatgctttggtgtaaagatggccatgtagaaacattttacccaaaattacaatctagtcaagcgtggcaaccgggtgttgctatgcctaatctttacaaaatgcaaagaatgctattagaaaagtgtgaccttcaaaattatggtgatagtgcaacattacctaaaggcataatgatgaatgtcgcaaaatatactcaactgtgtcaatatttaaacacactgacattagctgtaccctataatatgagagttatccattttggtgctggttctgataaaggagttgcaccaggtacagctgttttaagacaatggttgcctacaggtacgctgcttgtcgattcagatcttaatgactttgtctctgatgcagattcaactttgattggtgattgtgcaactgtacatacagctaataaatgggatctcattattagtgatatgtacgaccctaagactaagaatgtcacaaaagaaaacgactctaaagagggttttttcacttacatttgtgggtttatacaacaaaagctagctcttggaggttccgtggctataaagataacagaacattcttggaatgctgatctttataagctcatgggacacttcgcatggtggacagcctttgttactaatgtgaatgcgtcatcatctgaagcatttttaatcggatgtaactaccttggcaaaccacgcgaacaaatagatggttatgtcatgcatgcaaattacatattttggaggaatacaaatccaattcagctttcttcttattctttattcgacatgagtaaattcccccttaaattaaggggtactgctgttatgtctttaaaagaaggtcaaatcaatgatatgattctctctcttcttagtaaaggtagacttataattagagaaaacaacagagttgttatttctagtgatgttcttgttaacaactaaacgaacaatgtttgtttttcttgttttattgccactagtctctagtcagtgtgttaatcttacaaccagaactcaattaccccctgcatacactaattctttcacacgtggtgtttattaccctgacaaagttttcagatcctcagttttacattcaactcaggacttgttcttacctttcttttccaatgttacttggttccatgctatacatgtctctgggaccaatggtactaagaggtttgataaccctgtcctaccatttaatgatggtgtttactttgcttccactgagaagtctaacataataagaggctggatttttggtactactttagattcgaaaacccagtccctacttattgttaataacgctactaatgttgttatcaaagtctgtgaatttcaattttgtaacgatccatttttgggtgtttattaccacaaaaacaacaaaagttggatggaaagtgagttcagagtttattctagtgcgaataattgcacttttgaatacgtctctcagccttttcttatggaccttgaaggaaaacagggtaatttcaaaaatcttagggaatttgtgttcaagaatattgatggttacttcaagatatactctaagcacacgcctattaatttagtgcgtgatctccctcagggtttttcggctttagaaccattggtagatttgccaataggtattaacatcactaggtttcaaactttacttgctttacatagaagttatttaactcctggtgattcttcttcaggttggacagctggtgctgcagcttattatgtgggttatcttcaacctaggacttttctactgaagtacaatgaaaatggaaccattacagatgctgtagactgtgcacttgaccctctctcagaaacaaagtgtacgttgaaatccttcactgtagaaaaaggaatctatcaaacttctaactttagagtccaaccaacagaatctattgttagatttcctaacatcacaaacttgtgcccttttggtgaagtttttaacgccaccagatttgcatctgtttatgcttggaacaggaagagaatcagcaactgtgttgctgattattctgtcctgtataattccgcatcattttccacttttaagtgttatggagtgtctcctactaaattaaatgatctctgctttactaatgtctatgcagattcatttgtaattagaggtgatgaagtcagacaaatcgctccagggcaaactggaaagattgctgattataactacaaattaccagatgattttacaggctgcgttatagcttggaattctaacaatcttgattctaaggttggtggtaattataattacctgtacagattgtttaggaagtctaatctcaaaccttttgagagagatatttcaactgaaatctatcaggccggtagcacaccttgtaatggtgttgaaggttttaattgttactttcctctgcaatcatatggtttccaacccactaatggtgttggttaccaaccatacagagtagtagtactttcttttgaacttctacatgcaccagcaactgtttgtggacctaaaaagtctactaatttggttaagaacaagtgtgtcaatttcaacttcaatggtttaacaggcacaggtgttcttactgagtctaacaaaaagtttctgcctttccaacaatttggcagagacattgctgacactactgatgctgttcgtgatccacaaacacttgagattcttgacattacaccatgttcttttggtggtgtcagtgttataacaccaggaacaaatacttctaaccaggttgctgttctttatcaggatgttaactgcacagaagtccctgttgctattcatgcagatcaacttactcctacttggcgtgtttattctacaggttctaatgtttttcaaacacgtgcaggctgtttaataggggctgaacatgtcaacaactcatatgagtgtgacatacccattggtgcaggtatatgcgctagttatcagactcagactaattctcctcggagagcaagaagtgtagctagtcaatccatcattgcctacactatgtcacttggtgcagaaaattcagttgcttactctaataactctattgccatacccacaaattttactattagcgttaccacagaaattctaccagtgtctatgaccaagacatcagtagattgtacaatgtacatttgtggtgattcaactgaatgcagcaatcttttgttgcaatatggcagtttttgtacacaattaaaccgtgctttaactggaatagctgttgaacaagacaaaaacacccaagaagtttttgcacaagtcaaacaaatttacaagacaccaccaattaaagattttggcggttttaattttagccagatactgccagatccatcaaaaccaagcaagaggtcatttattgaagatctactgttcaacaaagtgacacttgcagatgctggcttcatcaaacaatatggtgattgccttggtgatattgctgctagagacctcatttgtgcacaaaagtttaacggccttactgttttgccacctttgctcacagatgaaatgattgctcaatacacttctgcactgttagcaggtacaatcacttctggttggacttttggtgcaggtgctgcattacaaataccatttgctatgcaaatggcttataggtttaatggtattggagttacacagaatgttctctatgagaaccaaaaattgattgccaaccaatttaatagtgctattggcaaaattcaagactcactttcttccacagcaagtgcacttggaaaacttcaagatgtggtcaaccaaaatgcacaagctttaaacacgcttgttaaacaacttagctccaattttggtgcaatttcaagtgttttaaacgacatcctttcacgtcttgacaaagttgaggctgaagtgcaaattgataggttgatcacaggcagacttcaaagtttgcagacatatgtgactcaacaattaattagagctgcagaaatcagagcttctgctaatcttgctgctactaaaatgtcagagtgtgtacttggacaatcaaaaagagttgacttttgcggaaagggctatcatcttatgtcatttcctcagtcagcacctcatggtgtcgtctttttgcatgtgacttatgtccctgcacaagaaaagaacttcacaactgctcctgccatttgtcatgatggaaaagcacactttcctcgtgaaggtgtctttgtttcaaatggcacacactggtttgtaacacaaaggaatttttatgaaccacaaatcattactacagacaacacatttgtgtctggtaactgtgatgttgtaataggaattgtcaacaacacagtttatgatcctttgcaacctgaattagactcattcaaggaggagcttgataaatacttcaagaaccatacctcaccagatgttgatttaggtgacatctctggcattaatgcttcagttgtaaacattcagaaagaaatcgaccgcctcaatgaggttgccaagaatttaaatgaatctctcatcgatctccaagaacttggaaagtatgagcagtatataaaatggccatggtacatttggctaggttttatagctggcttgattgccatagtaatggtgacaattatgctttgctgtatgaccagttgctgtagttgtctcaagggctgttgttcttgtggatcctgctgcaaatttgacgaggacgactctgagccagtgctcaaaggagtcaaattacattacacataaacgaacttatggatttgtttatgagaatcttcacaattggaactgtaactttgaagcaaggtgaaatcaaggatgctactccttcagattttgttagagctactgcaacgataccgatacaagcatcacttcctttcggatggcttattgttggcgttgcacttcttgctgtttttcagagcgcttccaaaatcataaccctcaaaaagagatggcaactagcactctccaagggtgttcactttgtttgcaacttgctgttgttgtttgtaacagtttactcacatcttttgcttgttgctgctggccttgaagccccttttctctatctttatgctttagtctacttcttgcagagtataaactttgtacgcataataatgaggctttggctttgctggaaatgccgttccaaaaacccattactttatgatgccaactattttctttgctggcatactaattgttacgactattgtataccttacaatagtgtaacttcttcaattgtcattacttcaggtgatggcacaacaagtcctatttctgaacatgactaccagattggtggttatactgaaaaatgggaatctggagtaaaagactgtgttgtattacacagttacttcacttcagactattaccagctgtactcaactcaattgagtacagacactggtgttgaacatgttaccttcttcatctacaataaaatcgttgatgagcctgaagaacatgtccaaattcacacaatcgacgtttcatccggagttgttaatccagtaatggaaccaatttatgatgaaccgacgacgactactagcgtgcctttgtaagcacaagctgatgagtacgaacttatggcagattccaacggtactattaccgttgaggagctgaaaaagctccttgaacaatggaacctagtaataggtttcctattccttacatggatttgcctgctgcaatttgcctatgccaacaggaataggtttttgtacatcattaagttgattttcctctggctgttatggccagtaactttagcttgttttgtgcttgctgctgtttacagaataaattggatcaccggtggaattgctattgcaatggcttgtcttgtaggattgatgtggctaagctacttcattgcttctttcagactgtttgcgcgtacgcgttccatgtggtcattcaatccagaaactaacattcttctcaacgtgccactccatggaactattctgactagaccgcttctagaaagtgaactcgtaatcggagctgttatccttcgtggacatcttcgtattgctggacatcatctaggacgctgtgacatcaaggatctacctaaagaaatcactgttgctacatcacgaacgctttcttattacaaattgggagcttcacagcgtgtagcaggtgattcaggttttgctgcatatagtcgctacaggattggcaactataaattaaacacagaccattccagtagcagtgacaatattgctttgcttgtacagtaaacgaacatgaaaattattcttttcttggcactgataacactcgctacttgtgagctttatcactaccaagagtgtgttagaggtacaacagtacttttaaaagaaccttgctcgtcgggaacatacgagggcaattcaccatttcatcctctagctgataacaaatttgcactgacttgctttagcactcaatttgcttttgcttgtcctgacggcgtaaaacacgtctatcagttacgtgccagatcagtttcacctaaactgttcatcagacaagaggaagttcaagaactttactctccaatttttcttattgttgcggcaatagtgtttataacactttgcttcacactcaaaagaaagacagaatgattgaactttcattaattgacttctatttgtgctttttagcctttctgctattccttgttttaattatgcttattatcttttggttctcacttgaactgcaagatcataatgaaacttgtcacgcctaaacgaacatgaaatttcttgttttcttaggaatcatcacaactgtagctgcatttcaccaagaatgtagtttacagtcatgtactcaacatcaaccatatgtagttgatgacccgtgtcctattcacttctattctaaatggtatatcagagtaggagctagaaaatcagcacctttaattgaattgtgcgtggatgaggctggttctaaatcacccattcagtacatcgatatcggtaattatacagtttcctgtttaccttttacaattaactgccaggaacctaaattgggtagtcttgtagtgcgttgttcgttctacgaggactttttagagtatcatgacgttcgtgttgttttagatttcatctaaacgaacaaactaaaatgtctgataatggacctcaaaatcagcgaaatgcacctcgcattacgtttggtggaccatcagattcaactggcagtaaccagaatggagaacgaagtggtgcgcgatcaaaacaacgccgcccgcaaggtttacccaataatactgcgtcttggttcaccgctctcactcaacatggcaaggaagatttaaaattccctcgaggacaaggcgttccaattaacaccaatagcagtccagatgaccaaattggctactaccgccgcgccacaagacgaattcgtggtggtgatggtaaaatgaaagatctcagtccaagatggtatttctactatctaggaactgggccagaagctggacttccttatggtgctaacaaagatggcatcatatgggttgcaactgagggagccttgaatacaccaaaagatcacattggcaccagaaatcctgctaacaatgctgcaatcgtgctacaacttcctcaaggaacaacattaccaaaaggtttttacgcagaagggtctagaggtggaagtcaagcctcttctagatcatcatcacgtagtcgcaacagttcaagaaattcaactccaggttcaagtagaggaacttctcctgctagaatggctggaaatggaggtgatgctgctcttgctttgttactacttgacagattgaaccagcttgagagcaaaatgtctggtaaaggccaacaacaacaaggccaaactgtcactaagaaatctgctgctgaggcttctaagaagcctagacaaaaacgtactgccactaaagcatacaatgtaacacaagctttcggcagacgtggtccagaacaaactcaaggaaattttggggatcaggaactaatcagacaaggaactgattacaaacattggccgcaaattgcacaatttgctccttctgcttcagcgttctttggaatgtcgagaattggaatggaagtcacaccttcgggaacatggttgacctatacaggtgccatcaaattggatgacaaagatccaaatttcaaagatcaagtcattttgctgaataagcatattgacgcatacaaaacattcccaccaacagagcctaaaaaggacaaaaagaagaaggctgatgaaactcaagccttaccgcagagacagaagaaacagcaaactgtgactcttcttcctgctgcagatttggatgatttctccaaacaattgcaacaatccatgagcagtgctgactcaactcaggcctaaactcatgcagaccacacaaggcagatgggctatataaacgttttcgcttttccgtttacgatatatagtctactcttgtgcagaatgaattctcgtaactacatagcacaagtagatgtagttaactttaatctcacatagcaatctttaatcagtgtgtaacattagggaggacttgaaagagccaccacattttcaccgaggccacgcggagtacgatcgagtgtacagtgaacaatgctagggagagctgcctatatggaagagccctaatgtgtaaaattaattttagtagtgctatccccatgtgattttaatagcttcttaggagaatgacaaaaaaaaacaaaaaaaa

SEQ ID NO: 42 - DNA, 29348 bp, Artificial Sequence
  Synthesis optimized sequence E-protein and ORF8 double deletion
caaatataacgaaaggctcagtcgaaagactgggcctttcgttttatctgttgtttgtcgtaatacgactcactatagggattaaaggtttataccttcccaggtaacaaaccaaccaactttcgatctcttgtagatctgttctctaaacgaactttaaaatctgtgtggctgtcactcggctgcatgcttagtgcactcacgcagtataattaataactaattactgtcgttgacaggacacgagtaactcgtctatcttctgcaggctgcttacggtttcgtccgtgttgcagccgatcatcagcacatctaggtttcgtccgggtgtgaccgaaaggtaagatggagagccttgtccctggtttcaacgagaaaacacacgtccaactcagtttgcctgttttacaggttcgcgacgtgttagtacgtggttttggagattcagtggaagaagtcttatcagaggcacgtcaacatcttaaagatggcacttgtggcttagtagaagttgaaaaaggcgttttgcctcaacttgaacagccctatgtgttcatcaaacgttctgatgctagaactgcacctcatggtcatgttatggttgagctggtagcagaattagaaggtattcagtacggtcgtagtggtgagacattaggtgttttagttcctcatgtgggcgaaataccagtggcttaccgcaaagttcttcttagaaagaacggtaataaaggagctggtggccatagttacggcgctgatttaaagtcatttgacttaggcgacgagcttggcactgatccttatgaagatttccaagaaaactggaacactaaacatagcagtggtgttacccgtgaactcatgcgtgagttaaatggaggtgcatacactcgctatgtcgataacaacttctgtggacctgatggttaccctcttgagtgcattaaagaccttctagcacgtgctggtaaagcttcatgcactttgtccgaacaactggactttattgacactaagaggggtgtatactgctgccgtgaacatgagcatgaaattgcttggtacacggaacgttctgaaaagagctatgaattgcagacaccttttgaaattaaactggcaaagaaatttgacaccttcaatggggaatgtccaaattttgtatttcccctcaattccataatcaagactattcaaccaagggttgaaaagaaaaagcttgatggctttatgggtagaattcgatctgtctatccagttgcgtcaccaaatgaatgcaaccaaatgtgcctttcaactctcatgaagtgtgatcattgtggtgaaacttcatggcagacgggcgattttgttaaagccacttgcgaattttgtggcactgagaatttgactaaagaaggtgccactacttgtggttacttaccccaaaatgctgttgttaaaatttactgtccagcatgtcacaattcagaagtaggacctgagcatagtcttgccgaataccataatgaatctggcttgaaaaccattcttcgtaagggtggtcgcactattgcttttggaggatgtgtgttctcttatgttggttgccataacaagtgtgcttattgggttccacgtgcttcagctaacataggttgtaaccatacaggtgttgttggagaaggttccgaaggtcttaatgacaaccttcttgaaatactccaaaaagagaaagtcaacatcaatattgttggtgactttaaacttaatgaagagatcgccattattttggcatctttttctgcttccacaagtgcttttgtggaaactgtgaaaggtttggattataaagcattcaaacagattgttgaatcctgtggtaattttaaggttacaaagggaaaagctaaaaaaggtgcctggaatattggtgaacagaaatcaatactgagtcctctttatgcatttgcatcagaggctgctcgtgttgtacgatcaattttctcccgcactcttgaaactgctcaaaattctgtgcgtgttttacagaaggccgctataacaatactagatggaatttcacagtattcactgagactcattgatgctatgatgttcacatctgatttggctactaacaatctagttgtaatggcctacattacaggtggtgttgttcagttgacttcgcagtggctaactaacatctttggcactgtttatgaaaaactcaaacccgtccttgattggcttgaagagaagtttaaggaaggtgtagagtttcttagagacggttgggagattgttaaattcatctcaacctgtgcttgtgaaattgtcggtggacaaattgtcacctgtgctaaggaaattaaggagagtgttcagacattctttaagcttgtaaacaagtttttggctttgtgtgctgactctatcattattggtggagctaaacttaaagccttgaatttaggtgaaacatttgtcacgcactcaaagggattgtacagaaagtgtgttaaatccagagaagaaactggcctactcatgcctctaaaagccccaaaagaaattatcttcttagagggagaaacacttcccacagaagtgttaacagaggaagttgtcttgaaaactggtgatttacaaccattagaacaacctactagtgaagctgttgaagctccattggttggtacaccagtttgtattaacgggcttatgttgctcgaaatcaaagacacagaaaagtactgtgcccttgcacctaatatgatggtaacaaacaataccttcacactcaaaggcggtgcaccaacaaaggttacttttggtgatgacactgtgatagaagtgcaaggttacaagagtgtgaatatcacttttgaacttgatgaaaggattgataaagtacttaatgagaagtgctctgcctatacagttgaactcggtacagaagtaaatgagttcgcctgtgttgtggcagatgctgtcataaaaactttgcaaccagtatctgaattacttacaccactgggcattgatttagatgagtggagtatggctacatactacttatttgatgagtctggtgagtttaaattggcttcacatatgtattgttctttctaccctccagatgaggatgaagaagaaggtgattgtgaagaagaagagtttgagccatcaactcaatatgagtatggtactgaagatgattaccaaggtaaacctttggaatttggtgccacttctgctgctttacaacctgaagaagaacaagaagaagattggttagatgatgatagtcaacaaactgttggtcaacaagacggcagtgaggacaatcagacaactactattcaaacaattgttgaggttcaacctcaattagagatggaacttacaccagttgttcagactattgaagtgaatagttttagtggttatcttaaacttactgacaatgtatacatcaagaatgcagacattgtggaagaagctaaaaaggtaaaaccaacagtggttgttaatgcagccaatgtttaccttaaacatggaggaggtgttgcaggagccttaaataaggctactaacaatgccatgcaagttgaatctgatgattacatagctactaatggaccacttaaagtgggtggtagttgtgttttaagcggacacaatcttgctaaacactgtttacatgttgtcggcccaaatgttaacaaaggtgaagatattcaacttcttaagagtgcttatgaaaattttaaccagcacgaagttctacttgcaccattattatcagctggtatttttggtgctgaccctatacattctttaagagtttgtgtagatactgttcgcacaaatgtctacttagctgtctttgataaaaatctctatgacaaacttgtttcaagctttttggaaatgaagagtgaaaagcaagttgaacaaaagatcgctgagattcctaaagaggaagttaagccatttataactgaaagtaaaccttcagttgaacagagaaaacaagatgataagaagatcaaagcttgtgttgaagaagttacaacaactctggaagaaactaagttcctcacagaaaacttgctcctttatatcgacattaatggcaatcttcatccagattctgccactcttgttagtgacattgacatcactttcttaaagaaagatgctccatatatagtgggtgatgttgttcaagagggtgttttaactgctgtggttatacctactaaaaaggctggtggcactactgaaatgctagcgaaagctttgagaaaagtgccaacagacaattatataaccacttacccgggtcagggtttaaatggttacactgtagaggaggcaaagacagtgcttaaaaagtgtaaaagtgccttttacattctaccatctattatctctaatgagaagcaagaaattcttggaactgtttcttggaatttgcgagaaatgcttgcacatgcagaagaaacacgcaaattaatgcctgtctgtgtggaaactaaagccatagtttcaactatacagcgtaaatataagggtatcaagatacaagagggtgtggttgattatggtgctagattttacttttacaccagtaaaacaactgtagcgtcacttatcaacacacttaacgatctaaatgaaactcttgttacaatgccacttggctatgtaacacatggcttaaatttggaagaagctgctcggtatatgagatctctcaaagtgccagctacagtttctgtttcttcacctgatgctgttacagcgtataatggttatcttacttcttcttctaaaacacctgaagaacattttattgaaaccatctcacttgctggttcctataaagattggtcctattctggacaatctacacaactaggtatagaatttcttaagagaggtgataaaagtgtatattacacgtccaatcctaccacattccacctagatggtgaagttatcacctttgacaatcttaagacacttctttctttgagagaagtgaggactattaaggtgtttacaacagtagacaacattaacctccacacgcaagttgtggacatgtcaatgacatatggacaacagtttggtccaacttatttggatggagctgatgttactaagataaaacctcataactcacatgaaggtaaaacattttacgttttgcctaatgatgacactctacgtgttgaggcttttgagtactaccacacaactgatcctagttttctgggtaggtacatgtcagcattaaatcacactaaaaagtggaaatacccacaagttaatggtttaacttcgattaaatgggcagataacaactgttatcttgccactgcattgttaacactccaacaaatagagttgaagtttaatccacctgctctacaagatgcttattacagagcaagggctggtgaagctgctaacttttgtgcacttatcttagcctactgtaataagacagtaggtgagttaggtgatgttagagaaacaatgagttacttgtttcaacatgccaatttagattcttgcaaaagagtcttgaacgtggtgtgtaaaacttgtggacaacagcagacaacccttaagggtgtagaagctgttatgtacatgggcacactttcttatgaacaattcaagaaaggtgttcagataccttgtacgtgtggtaaacaagctacaaaatatctagtacaacaggagtcaccttttgttatgatgtcagcaccacctgctcagtatgaacttaagcatggtacatttacttgtgctagtgagtacactggtaattaccagtgtggtcactataagcatataacttctaaggaaactttgtattgcatagacggtgctttacttacaaagtcctcagaatacaaaggtcctattacggatgttttctacaaagaaaacagttacacaacaaccataaaaccagttacttataagttggatggtgttgtttgtacagaaattgaccctaagttggacaattattataagaaggacaactcttatttcacagagcaaccaattgatcttgtaccaaaccaaccatatccaaacgcaagcttcgataattttaagttcgtatgcgataatatcaaatttgctgatgatctcaaccagttaactggttataagaaacctgcttcaagagagcttaaagttacatttttccctgacttaaatggtgatgtggtggctattgattataaacactacacaccctcttttaagaaaggagctaaattgttacataagcctattgtttggcatgttaacaatgcaactaataaagccacgtataaaccaaatacctggtgtatacgttgtctttggagcacaaaaccagttgaaacatcaaattcgtttgatgtactgaagtcagaggacgcgcagggaatggataatcttgcatgtgaagatctaaaaccagtctctgaagaagtagtggaaaatcctaccatacagaaagacgttcttgagtgtaatgtgaaaactaccgaagttgtaggagacattatacttaaaccagcaaataatagtttgaagatcacagaagaggttggccacacagatctaatggctgcttatgtagacaattctagtcttactattaagaaacctaatgaactctctagagtattaggtttgaaaacccttgctactcatggtttagctgctgttaatagtgtcccttgggatactatagctaattatgctaagccttttcttaacaaagttgttagtacaactactaacatagttacacggtgtcttaatcgtgtttgtactaattatatgccttacttctttactttattgctacaattgtgtacttttactagaagtacaaattctagaatcaaggcatctatgccgactactatagcaaagaatactgttaagagtgtcggtaaattttgtctagaggcttcatttaattatctcaagtcacctaacttttctaagctgataaacattatcatctggtttttgctattaagtgtttgcctaggttctttaatctactcaaccgctgctttaggtgttttaatgtctaatttaggcatgccttcttactgtactggttacagagaaggctatttgaactctactaatgtcactattgcaacctactgtactggatctataccttgtagtgtttgtcttagtggtttagattctttagacacctatccttctcttgaaactatacagattaccatttcatctttcaaatgggatttaactgcttttggcttagttgcagagtggtttttggcatatattcttttcactaggtttttctatgtacttggattggctgcaatcatgcaattgtttttcagctattttgcagtccattttattagtaactcttggcttatgtggcttataattaatcttgtgcagatggccccgatttcagctatggttagaatgtacatcttctttgcctcattttattatgtgtggaaaagttatgtgcatgttgtagacggttgtaattcatcaacttgtatgatgtgttacaaacgtaatagagcaacaagagtcgaatgtacaactattgttaatggtgttagaaggtccttttatgtctatgctaatggaggtaaaggcttttgcaaactacacaattggaattgtgttaattgtgatacattctgtgctggtagtacatttattagtgatgaagttgcgagagacttgtcactacagtttaaaagaccaataaatcctactgaccaatcttcttacatcgttgatagtgttacagtgaagaatggttccatccatctttactttgataaagctggtcaaaagacttatgaaagacattctctctctcattttgttaacttagacaacctgagagctaataacactaaaggttcattgcctattaatgttatcgttttcgacggtaaatcaaaatgtgaagaatcatctgcaaaatcagcgtctgtttactacagtcagcttatgtgtcaacctatactgttactagatcaggcattagtgtctgatgttggtgatagtgcggaagttgcagttaaaatgtttgatgcttacgttaatacgttttcatcaacttttaacgtaccaatggaaaaactcaaaacactagttgcaactgcagaagctgaacttgcaaagaatgtgtccttagacaatgtcttatctacgtttatttcagcagctcggcaagggtttgttgattcagatgtagaaactaaagatgttgttgaatgtcttaaattgtcacatcaatctgacatagaagttactggcgatagttgtaataactatatgctcacctataacaaagttgaaaacatgacaccccgtgaccttggtgcttgtattgactgtagtgctagacatattaatgcgcaggtagcaaaaagtcacaacattgctttgatatggaacgttaaagatttcatgtcattgtctgaacaactacgaaaacaaatacgtagtgctgctaaaaagaataacttacccttcaagttgacatgtgcaactactagacaagttgttaatgttgtaacaacaaagatagcacttaagggtggtaaaattgtgaataactggttgaagcagcttattaaagttacacttgtgttcctttttgttgctgctattttctatctgataacacctgttcatgtcatgtctaaacatactgacttttcaagtgaaatcataggatacaaggctattgatggtggtgtcactcgtgacatagcatctacagatacttgttttgctaacaaacatgctgattttgacacatggtttagccagcgtggtggtagttatactaatgacaaagcttgcccattgattgctgcagtcataacaagagaagtgggttttgtcgttcctggtttgcctggaacgatattacgcacaactaatggtgactttttgcatttcttacctagagtttttagtgcagttggtaacatctgttacacaccatcaaaacttatagagtacactgactttgcaacatcagcttgtgttttggctgctgaatgtacaatttttaaagacgcttctggtaagccagtaccatattgttatgataccaatgtactagaaggttctgttgcttatgaaagtttacgccctgacacacgttatgtgctcatggatggctctattattcaatttcctaacacctaccttgaaggttctgtaagagtggtaacaacttttgattctgagtactgtaggcacggcacttgtgaaagatcagaagctggtgtttgtgtatctactagtggtagatgggtacttaacaacgattattacagatctttaccaggagttttctgtggtgtagatgctgtaaatttgcttactaacatgtttacaccactaattcaacctattggtgctttggacatatcagcatctatagtagctggtggtattgtagctatcgtagtaacatgccttgcctactattttatgaggtttagacgtgcttttggtgaatacagtcatgtagttgcctttaatactctcctattccttatgtcattcactgtactctgtttaacaccagtttactcattcttacctggtgtttattctgttatttacctgtacttgacattttatctgactaatgatgtttcttttctcgcacatattcagtggatggttatgttcacacctttagtacctttctggataacaattgcttacatcatttgtatttccacaaagcatttctattggttctttagtaattacctaaagagacgtgtagtctttaatggtgtttcctttagtacttttgaagaagctgcgctgtgcacctttttgttaaataaggagatgtatctaaagttgcgtagtgatgtgctattacctcttacgcaatataatagatacttagctctttataacaagtacaagtatttcagtggagcaatggatacaactagctacagagaagctgcttgttgtcatctcgcaaaggctctcaatgacttcagtaactcaggttctgatgttctttaccaaccaccacaaacctctatcacctcagctgttttgcagagtggttttagaaaaatggcattcccatctggtaaagttgagggttgtatggtacaagtaacttgtggtacaactacacttaacggtctttggcttgatgacgtagtttactgtccaagacatgtgatctgcacctctgaagatatgcttaaccctaattatgaagatctactcatccgtaagtctaatcataacttcttggtacaggctggtaatgttcaactcagggttattggacattctatgcaaaattgtgtacttaagcttaaggttgatacagccaatcctaagacacctaagtataagtttgttcgcattcaaccaggacagactttttcagtgttagcttgttacaatggttcaccatctggtgtttaccaatgtgctatgaggcccaatttcactattaagggttcattccttaatggttcatgtggtagtgttggttttaacatagattatgactgtgtctctttttgttacatgcaccatatggaattaccaactggagttcatgctggcacagacttagaaggtaacttttatggaccttttgttgacaggcaaacagcacaagcagctggtacagatacaactattacagttaatgttcttgcttggttgtacgctgctgttataaatggagacaggtggtttctcaatcgatttaccacaactcttaatgactttaaccttgtggctatgaagtacaattatgaacctctaacacaagaccatgttgacatactaggacctctttctgctcaaactggaattgccgttttagatatgtgtgcttcattaaaagaacttctgcaaaatggtatgaatggacgtaccatattgggtagtgctttattagaagatgagtttacaccttttgatgttgttagacaatgctcaggtgttactttccaaagtgcagtgaaaagaacaatcaagggtacacaccactggttgttactcacaattttgacttcacttttagttttagtccagagtactcaatggtctttgttctttttcttctacgaaaatgcctttttaccttttgctatgggtattattgctatgtctgcttttgcaatgatgtttgtcaaacataagcatgcatttctctgtttgtttttgttaccttctcttgccactgtagcttactttaatatggtctacatgcctgctagttgggtgatgcgtattatgacatggttggatatggttgatactagtttgtctggttttaagctaaaagactgtgttatgtatgcatcagctgtagtgttactaatccttatgacagcaagaactgtgtatgatgatggtgctaggagagtgtggacacttatgaatgtcttgacactcgtttataaagtttactatggcaacgctttagatcaagccatttccatgtgggctcttataatctctgttacttctaactactcaggtgtagttacaactgtcatgtttttggccagaggtattgtttttatgtgtgttgagtattgccctattttcttcataactggtaatacacttcagtgtataatgctagtctattgtttcttaggctatttttgtacttgttacttcggcctcttttgtttactcaaccgctactttagactgactcttggtgtttatgattacttagtgtctacacaggagtttagatatatgaattcacagggactactcccacccaagaatagcatagatgccttcaaactcaacattaaattgttgggtgttggtggcaaaccttgtatcaaagtagccactgtacagtctaaaatgtcagatgtaaagtgcacatcagtagtcttactctcagttttgcaacaactcagagtagaatcatcatctaaattgtgggctcaatgtgtccagttacacaatgacattctcttagctaaagatactactgaagcctttgaaaaaatggtttcactactttctgttttgctttccatgcagggtgctgtagacataaacaagctttgtgaagaaatgctggacaacagggcaaccttacaagctatagcctcagagtttagttcccttccatcatatgcagcttttgctactgctcaagaagcttatgagcaggctgttgctaatggtgattctgaagttgttcttaaaaagttgaagaagtctttgaatgtggctaaatctgaatttgaccgtgatgcagccatgcaacgtaagttggaaaagatggctgatcaagctatgacccaaatgtataaacaggctagatctgaggacaagagggcaaaagttactagtgctatgcagacaatgcttttcactatgcttagaaagttggataatgatgcactcaacaacattatcaacaatgcaagagatggttgtgttcccttgaacataatacctcttacaacagcagccaaactaatggttgtcataccagactacaacacatataagaatacgtgtgatggtacaacatttacttatgcatcagcattgtgggaaatccaacaggttgtagatgcagatagtaaaattgttcagcttagtgaaattagtatggacaattcacctaatttagcatggcctcttattgtaacagctttaagggccaattctgctgtcaaattacagaataatgagcttagtcctgttgcactaagacaaatgtcttgtgctgccggtactacacaaactgcttgcactgatgacaatgcgttagcttactacaacacaacaaagggaggtaggtttgtacttgcactgttatccgatttacaggatttgaaatgggctagattccctaagagtgatggaactggtactatctatacagaactggaaccaccttgtaggtttgttacagacacacctaaaggtcctaaagtgaagtatctttacttcatcaaaggattaaacaacctaaatagaggtatggtacttggtagtttagctgccacagtacgtttacaagctggtaatgcaacagaagttcctgctaattcaactgtactttctttctgtgcttttgctgtagatgctgctaaagcttacaaagattatctagctagtgggggacaaccaatcactaattgtgttaagatgttgtgtacacacactggtactggtcaggcaataacagttacaccggaagccaatatggatcaagaatcctttggtggtgcatcgtgttgtctgtactgccgttgtcatatagatcatccaaatcctaaaggattttgtgacttaaaaggtaagtatgtacaaatacctacaacttgtgctaatgaccctgtgggttttacacttaaaaacacagtctgtaccgtctgcggtatgtggaaaggttatggttgtagttgtgatcaactccgcgaacccatgcttcagtcagctgatgcacaatcgtttttaaacgggtttgcggtgtaagtgcagcccgtcttacaccgtgcggcacaggcactagtactgatgtcgtatatagagcttttgacatctacaatgataaagtagctggttttgctaagttcctaaaaactaattgttgtcgcttccaagaaaaggacgaagatgacaatctcattgattcttactttgtagttaagagacacactttctctaactaccaacatgaagaaacaatttacaacctgcttaaggattgtccagctgttgctaaacatgacttctttaagtttagaatagacggtgacatggtaccacatatatcacgtcaacgtcttactaaatacacaatggcagacctcgtctatgctttaaggcattttgatgaaggtaattgtgacacattaaaagaaatacttgtcacatacaattgttgtgatgatgactacttcaataaaaaggactggtatgattttgtagaaaacccagatatattacgcgtatacgccaacttaggtgaacgtgtacgccaagctttgttaaaaacagtacagttctgtgatgccatgcgaaatgctggtattgttggtgtactgacattagataatcaagatctcaatggtaactggtatgactttggtgatttcatacaaaccacgccaggtagtggagttcctgttgtagactcttattattcattgctcatgcctatattaaccttgaccagggctttaactgcagagtcacatgttgacactgacttaacaaagccttacattaagtgggatttgttaaaatacgacttcacggaagagaggttaaaactctttgaccgttattttaaatactgggatcagacataccacccaaattgtgttaactgtttggatgacagatgcattctgcattgtgcaaactttaatgttctgttctctacagtgttcccacctacaagttttggaccactagtgagaaaaatatttgttgatggtgttccatttgtagtttcaactggataccacttcagagagctaggtgttgtacataatcaggatgtaaacttacatagctctagacttagttttaaggaattacttgtgtatgctgctgatcctgctatgcatgctgcttctggtaatctattactagataaacgcactacgtgcttttcagtagctgcacttactaacaatgttgcttttcaaactgtcaaacccggtaattttaacaaggacttctatgactttgctgtgtctaagggtttctttaaggaaggaagttctgttgaattaaaacacttcttctttgctcaggatggtaatgctgctatcagcgattatgactactatcgttataatctaccaacaatgtgtgatatcagacaactactatttgtagttgaagttgttgataagtactttgattgttacgatggtggctgtattaatgctaaccaagtcatcgtcaacaacctagacaaatcagctggttttccatttaataaatggggtaaggctagactttattatgattccatgagttatgaggatcaagatgcacttttcgcatatacaaaacgtaatgtcatccctactataactcaaatgaaccttaagtatgccattagtgcaaagaatagagctcgcaccgtagctggtgtctctatctgtagtactatgaccaatagacagtttcatcaaaaattactcaagtcaatagccgccactagaggagctactgtagtaattggaacaagcaaattctatggtggttggcacaacatgctcaaaactgtttatagtgatgtagaaaaccctcaccttatgggttgggattatcctaaatgtgatagagccatgcctaacatgcttagaattatggcctcacttgttcttgctcgcaaacatacaacgtgttgtagcttgtcacaccgtttctatagattagctaatgagtgtgctcaagtattgagtgaaatggtcatgtgtggcggttcactatatgttaaaccaggtggaacctcatcaggagatgccacaactgcttatgctaatagtgtgtttaacatttgtcaagctgtcacggccaatgttaatgcacttttatctactgatggtaacaaaattgccgataagtatgtccgcaatttacaacacagactttatgagtgtctctatagaaatagagatgttgacacagactttgtgaatgagttttacgcatatttgcgtaaacatttctcaatgatgatactctctgacgatgctgttgtgtgtttcaatagcacttatgcatctcaaggtctagtggctagcataaagaactttaagtcagttctttactatcaaaacaacgtttttatgtctgaagcaaaatgttggactgagactgaccttactaaaggacctcatgaattttgctctcaacatacaatgctagttaaacagggtgatgattatgtgtaccttccttacccagatccatcaagaatcctaggtgccggttgttttgtagatgatatcgtaaaaacagatggtacacttatgattgaacggttcgtgtctttagctatagatgcttacccacttactaaacatcctaatcaggagtatgctgatgtctttcatttgtacttacaatacatacgtaagctacatgatgagttaacaggacacatgttagacatgtattctgttatgcttactaatgataacacttcaaggtattgggaacctgagttttatgaggctatgtacacaccgcatacagtcttacaagctgttggtgcttgtgttctttgcaattcacagacttcattaagatgtggtgcttgcatacgtagaccattcttatgttgtaaatgctgttacgaccatgtcatctcaacatcacataaattagtcttgtctgttaatccgtatgtttgcaatgctccaggttgtgatgtcacagatgtgactcaactttacttaggaggtatgagctattactgtaagtcacataaaccacccattagttttccattgtgtgctaatggacaagtttttggtctctacaagaatacatgtgttggtagcgataatgttactgactttaatgcaattgcaacatgtgactggacaaatgctggtgattacattttagctaacacctgtactgaaagactcaagctttttgcagcagaaacgctcaaagctactgaggagacatttaaactgtcttatggtattgctactgtacgtgaagtgctgtctgacagagaattacatctttcatgggaagttggtaaacctagaccaccacttaaccgaaattatgtctttactggttatcgtgtaactaaaaacagtaaagtgcaaatcggagagtacacctttgaaaaaggtgactatggtgatgctgttgtttaccgaggtacaacaacttacaaactcaacgttggtgattattttgtgctgacatcacatacagtaatgccattaagtgcacctacactagtgccacaagagcactatgttagaattactggcttatacccaacactcaatatctcagatgagttttctagcaatgttgcaaattatcaaaaggttggtatgcaaaagtattctacactccagggaccacctggtactggtaaaagtcattttgctattggtctagctctctactacccttctgctcgcatagtatatacagcttgctctcatgcagctgttgatgcactatgtgagaaggcattaaaatatttgcccatagacaaatgtagtagaattatacctgcacgtgctcgtgtagagtgttttgataaattcaaggtgaattcaacattagaacagtatgtcttttgtactgtaaatgcattgcctgagacgacagcagatatagttgtctttgatgaaatttcaatggccacaaattatgatttgagtgttgtcaatgccagattacgtgctaagcactatgtgtacattggtgatcctgctcaattacctgcaccacgcacattactaactaagggtacactagaaccagaatatttcaattcagtgtgtagacttatgaaaactataggtccagacatgttcctcggaacttgtcgtagatgtcctgctgaaattgttgacactgtgagtgctttggtttatgataataagcttaaggcacataaagacaaatcagctcaatgctttaaaatgttctacaagggtgttatcacgcatgatgtttcatctgcaattaacaggccacaaataggcgtggtaagagaattccttacacgtaaccctgcttggagaaaagctgtctttatttcaccttacaattcccagaatgctgtagcctcaaagattttgggactaccaactcaaactgttgattcatcacagggctcagaatatgactatgtcatattcactcaaaccactgaaacagctcactcttgtaatgtaaacagattcaacgttgctattaccagagcaaaagtaggcatactttgcataatgtctgatagagacctttatgacaagttgcaatttacaagtcttgaaattccacgtaggaatgtggcaactttacaagctgaaaatgtaacaggactctttaaagattgtagtaaggtaatcactgggttacatcctacacaggcacctacacacttaagtgttgatactaaattcaaaactgaaggtttatgtgttgacatacctggcatacctaaggacatgacctatagaagattaatctctatgatgggtttcaaaatgaattaccaggttaatggttaccctaacatgtttatcacccgcgaagaagctataagacatgtacgtgcatggattggcttcgatgtcgaaggttgtcatgctactagagaagctgttggtaccaatttacctttacagctaggtttttctacaggtgttaacctagttgctgtacctacaggttatgttgatacacctaataatacagatttttccagagttagtgctaaaccaccgcctggagatcaatttaaacacctcataccacttatgtacaaaggacttccttggaatgtagtgcgtataaagattgtccaaatgttaagtgacacacttaaaaatctctctgacagagtcgtatttgtcttatgggcacatggctttgagttgacatctatgaagtattttgtgaagatcggacctgagcgcacatgttgtctatgtgatagacgtgctacatgcttttccactgcttcagacacttatgcctgttggcatcattctattggatttgattacgtctataatccgtttatgattgatgttcaacaatggggttttacaggtaacctacaaagcaaccatgatctgtattgtcaagtccatggtaatgcacatgtagctagttgtgatgcaatcatgactaggtgtctagctgtccacgagtgctttgttaagcgtgttgactggactattgaatatcctataatcggtgatgaactgaagattaatgcggcttgtagaaaggttcaacacatggttgttaaagctgcattattagcagacaaattcccagttcttcacgacattggtaaccctaaagctattaagtgtgtacctcaagctgatgtagaatggaagttctatgatgcacagccttgtagtgacaaagcttacaaaatagaagaactgttctattcttatgccacacattctgacaaattcacagatggtgtatgcctattttggaattgcaatgtcgatagatatcctgctaattccattgtttgtagatttgacactagagtgctatctaaccttaacttgcctggttgtgatggtggcagtttgtatgtaaataagcatgcattccacacaccagcttttgataaaagtgcttttgttaatctaaagcaacttccatttttctattactctgacagtccatgtgagtctcatggaaaacaagtagtgtcagatatagattatgtaccactaaagtctgctacgtgtataacacgttgcaatttaggtggtgctgtctgtagacatcatgctaatgagtacagattgtatctcgatgcttataacatgatgatctcagctggctttagcttgtgggtttacaaacaatttgatacctataacctctggaacacttttacaagacttcagagtttagaaaatgtggcttttaatgttgtaaataagggacactttgatggacaacagggtgaagtaccagtttctatcattaacaacactgtttacacaaaagttgatggtgttgatgtagaattgtttgagaacaaaaccacattacctgttaatgtagcatttgagctttgggctaagcgcaacattaaaccagtaccagaggtgaaaatactcaataatttgggtgtggacattgctgctaatactgtgatctgggactacaaaagagatgctccagcacatatatctactattggtgtttgttctatgactgacatagccaagaaaccaactgaaacgatttgtgcaccactcactgtcttttttgatggtagagttgatggtcaagtagacttatttagaaatgcccgtaatggtgttcttattacagaaggtagtgttaaaggtttacaaccatctgtaggtcccaaacaagctagtcttaatggagtcacattaattggagaagccgtaaaaacacagttcaattattacaagaaagtggatggtgttgtccaacaattacctgaaacttactttactcagagtagaaacttacaggaatttaagcccaggagtcaaatggaaattgatttcttagaacttgctatggatgaattcattgaacggtataaattagaaggctatgccttcgaacatatcgtttatggagattttagtcatagtcagttaggtggtttacatctactgattggactagctaaacgttttaaggaatcaccttttgaacttgaagattttattcctatggacagtacagttaaaaactacttcataacagatgcgcaaacaggttcatctaagtgtgtgtgttctgttattgatcttttacttgatgacttcgttgaaataataaagtcccaagatttatctgtagtttctaaggttgtcaaagtgactattgactatacagaaatctcatttatgctttggtgtaaagatggccatgtagaaacattttacccaaaattacaatctagtcaagcgtggcaaccgggtgttgctatgcctaatctttacaaaatgcaaagaatgctattagaaaagtgtgaccttcaaaattatggtgatagtgcaacattacctaaaggcataatgatgaatgtcgcaaaatatactcaactgtgtcaatatttaaacacactgacattagctgtaccctataatatgagagttatccattttggtgctggttctgataaaggagttgcaccaggtacagctgttttaagacaatggttgcctacaggtacgctgcttgtcgattcagatcttaatgactttgtctctgatgcagattcaactttgattggtgattgtgcaactgtacatacagctaataaatgggatctcattattagtgatatgtacgaccctaagactaagaatgtcacaaaagaaaacgactctaaagagggttttttcacttacatttgtgggtttatacaacaaaagctagctcttggaggttccgtggctataaagataacagaacattcttggaatgctgatctttataagctcatgggacacttcgcatggtggacagcctttgttactaatgtgaatgcgtcatcatctgaagcatttttaatcggatgtaactaccttggcaaaccacgcgaacaaatagatggttatgtcatgcatgcaaattacatattttggaggaatacaaatccaattcagctttcttcttattctttattcgacatgagtaaattcccccttaaattaaggggtactgctgttatgtctttaaaagaaggtcaaatcaatgatatgattctctctcttcttagtaaaggtagacttataattagagaaaacaacagagttgttatttctagtgatgttcttgttaacaactaaacgaacaatgtttgtttttcttgttttattgccactagtctctagtcagtgtgttaatcttacaaccagaactcaattaccccctgcatacactaattctttcacacgtggtgtttattaccctgacaaagttttcagatcctcagttttacattcaactcaggacttgttcttacctttcttttccaatgttacttggttccatgctatacatgtctctgggaccaatggtactaagaggtttgataaccctgtcctaccatttaatgatggtgtttactttgcttccactgagaagtctaacataataagaggctggatttttggtactactttagattcgaaaacccagtccctacttattgttaataacgctactaatgttgttatcaaagtctgtgaatttcaattttgtaacgatccatttttgggtgtttattaccacaaaaacaacaaaagttggatggaaagtgagttcagagtttattctagtgcgaataattgcacttttgaatacgtctctcagccttttcttatggaccttgaaggaaaacagggtaatttcaaaaatcttagggaatttgtgttcaagaatattgatggttacttcaagatatactctaagcacacgcctattaatttagtgcgtgatctccctcagggtttttcggctttagaaccattggtagatttgccaataggtattaacatcactaggtttcaaactttacttgctttacatagaagttatttaactcctggtgattcttcttcaggttggacagctggtgctgcagcttattatgtgggttatcttcaacctaggacttttctactgaagtacaatgaaaatggaaccattacagatgctgtagactgtgcacttgaccctctctcagaaacaaagtgtacgttgaaatccttcactgtagaaaaaggaatctatcaaacttctaactttagagtccaaccaacagaatctattgttagatttcctaacatcacaaacttgtgcccttttggtgaagtttttaacgccaccagatttgcatctgtttatgcttggaacaggaagagaatcagcaactgtgttgctgattattctgtcctgtataattccgcatcattttccacttttaagtgttatggagtgtctcctactaaattaaatgatctctgctttactaatgtctatgcagattcatttgtaattagaggtgatgaagtcagacaaatcgctccagggcaaactggaaagattgctgattataactacaaattaccagatgattttacaggctgcgttatagcttggaattctaacaatcttgattctaaggttggtggtaattataattacctgtacagattgtttaggaagtctaatctcaaaccttttgagagagatatttcaactgaaatctatcaggccggtagcacaccttgtaatggtgttgaaggttttaattgttactttcctctgcaatcatatggtttccaacccactaatggtgttggttaccaaccatacagagtagtagtactttcttttgaacttctacatgcaccagcaactgtttgtggacctaaaaagtctactaatttggttaagaacaagtgtgtcaatttcaacttcaatggtttaacaggcacaggtgttcttactgagtctaacaaaaagtttctgcctttccaacaatttggcagagacattgctgacactactgatgctgttcgtgatccacaaacacttgagattcttgacattacaccatgttcttttggtggtgtcagtgttataacaccaggaacaaatacttctaaccaggttgctgttctttatcaggatgttaactgcacagaagtccctgttgctattcatgcagatcaacttactcctacttggcgtgtttattctacaggttctaatgtttttcaaacacgtgcaggctgtttaataggggctgaacatgtcaacaactcatatgagtgtgacatacccattggtgcaggtatatgcgctagttatcagactcagactaattctcctcggagagcaagaagtgtagctagtcaatccatcattgcctacactatgtcacttggtgcagaaaattcagttgcttactctaataactctattgccatacccacaaattttactattagcgttaccacagaaattctaccagtgtctatgaccaagacatcagtagattgtacaatgtacatttgtggtgattcaactgaatgcagcaatcttttgttgcaatatggcagtttttgtacacaattaaaccgtgctttaactggaatagctgttgaacaagacaaaaacacccaagaagtttttgcacaagtcaaacaaatttacaagacaccaccaattaaagattttggcggttttaattttagccagatactgccagatccatcaaaaccaagcaagaggtcatttattgaagatctactgttcaacaaagtgacacttgcagatgctggcttcatcaaacaatatggtgattgccttggtgatattgctgctagagacctcatttgtgcacaaaagtttaacggccttactgttttgccacctttgctcacagatgaaatgattgctcaatacacttctgcactgttagcaggtacaatcacttctggttggacttttggtgcaggtgctgcattacaaataccatttgctatgcaaatggcttataggtttaatggtattggagttacacagaatgttctctatgagaaccaaaaattgattgccaaccaatttaatagtgctattggcaaaattcaagactcactttcttccacagcaagtgcacttggaaaacttcaagatgtggtcaaccaaaatgcacaagctttaaacacgcttgttaaacaacttagctccaattttggtgcaatttcaagtgttttaaacgacatcctttcacgtcttgacaaagttgaggctgaagtgcaaattgataggttgatcacaggcagacttcaaagtttgcagacatatgtgactcaacaattaattagagctgcagaaatcagagcttctgctaatcttgctgctactaaaatgtcagagtgtgtacttggacaatcaaaaagagttgacttttgcggaaagggctatcatcttatgtcatttcctcagtcagcacctcatggtgtcgtctttttgcatgtgacttatgtccctgcacaagaaaagaacttcacaactgctcctgccatttgtcatgatggaaaagcacactttcctcgtgaaggtgtctttgtttcaaatggcacacactggtttgtaacacaaaggaatttttatgaaccacaaatcattactacagacaacacatttgtgtctggtaactgtgatgttgtaataggaattgtcaacaacacagtttatgatcctttgcaacctgaattagactcattcaaggaggagcttgataaatacttcaagaaccatacctcaccagatgttgatttaggtgacatctctggcattaatgcttcagttgtaaacattcagaaagaaatcgaccgcctcaatgaggttgccaagaatttaaatgaatctctcatcgatctccaagaacttggaaagtatgagcagtatataaaatggccatggtacatttggctaggttttatagctggcttgattgccatagtaatggtgacaattatgctttgctgtatgaccagttgctgtagttgtctcaagggctgttgttcttgtggatcctgctgcaaatttgacgaggacgactctgagccagtgctcaaaggagtcaaattacattacacataaacgaacttatggatttgtttatgagaatcttcacaattggaactgtaactttgaagcaaggtgaaatcaaggatgctactccttcagattttgttagagctactgcaacgataccgatacaagcatcacttcctttcggatggcttattgttggcgttgcacttcttgctgtttttcagagcgcttccaaaatcataaccctcaaaaagagatggcaactagcactctccaagggtgttcactttgtttgcaacttgctgttgttgtttgtaacagtttactcacatcttttgcttgttgctgctggccttgaagccccttttctctatctttatgctttagtctacttcttgcagagtataaactttgtacgcataataatgaggctttggctttgctggaaatgccgttccaaaaacccattactttatgatgccaactattttctttgctggcatactaattgttacgactattgtataccttacaatagtgtaacttcttcaattgtcattacttcaggtgatggcacaacaagtcctatttctgaacatgactaccagattggtggttatactgaaaaatgggaatctggagtaaaagactgtgttgtattacacagttacttcacttcagactattaccagctgtactcaactcaattgagtacagacactggtgttgaacatgttaccttcttcatctacaataaaatcgttgatgagcctgaagaacatgtccaaattcacacaatcgacgtttcatccggagttgttaatccagtaatggaaccaatttatgatgaaccgacgacgactactagcgtgcctttgtaagcacaagctgatgagtacgaacttatggcagattccaacggtactattaccgttgaggagctgaaaaagctccttgaacaatggaacctagtaataggtttcctattccttacatggatttgcctgctgcaatttgcctatgccaacaggaataggtttttgtacatcattaagttgattttcctctggctgttatggccagtaactttagcttgttttgtgcttgctgctgtttacagaataaattggatcaccggtggaattgctattgcaatggcttgtcttgtaggattgatgtggctaagctacttcattgcttctttcagactgtttgcgcgtacgcgttccatgtggtcattcaatccagaaactaacattcttctcaacgtgccactccatggaactattctgactagaccgcttctagaaagtgaactcgtaatcggagctgttatccttcgtggacatcttcgtattgctggacatcatctaggacgctgtgacatcaaggatctacctaaagaaatcactgttgctacatcacgaacgctttcttattacaaattgggagcttcacagcgtgtagcaggtgattcaggttttgctgcatatagtcgctacaggattggcaactataaattaaacacagaccattccagtagcagtgacaatattgctttgcttgtacagtaagtgacaacagatgtttcatctcgttgactttcaggttactatagcagagatattactaatcatcatgaggacttttaaagtttccatttggaatcttgattacatcataaacctcataattaagaacttaagcaagtcactaactgagaataaatattctcaactagacgaggagcagccaatggagattgattaaacgaacatgaaaattattcttttcttggcactgataacactcgctacttgtgagctttatcactaccaagagtgtgttagaggtacaacagtacttttaaaagaaccttgctcgtcgggaacatacgagggcaattcaccatttcatcctctagctgataacaaatttgcactgacttgctttagcactcaatttgcttttgcttgtcctgacggcgtaaaacacgtctatcagttacgtgccagatcagtttcacctaaactgttcatcagacaagaggaagttcaagaactttactctccaatttttcttattgttgcggcaatagtgtttataacactttgcttcacactcaaaagaaagacagaatgattgaactttcattaattgacttctatttgtgctttttagcctttctgctattccttgttttaattatgcttattatcttttggttctcacttgaactgcaagatcataatgaaacttgtcacgcctaagacgttcgtgttgttttagatttcatctaaacgaacaaactaaaatgtctgataatggacctcaaaatcagcgaaatgcacctcgcattacgtttggtggaccatcagattcaactggcagtaaccagaatggagaacgaagtggtgcgcgatcaaaacaacgccgcccgcaaggtttacccaataatactgcgtcttggttcaccgctctcactcaacatggcaaggaagatttaaaattccctcgaggacaaggcgttccaattaacaccaatagcagtccagatgaccaaattggctactaccgccgcgccacaagacgaattcgtggtggtgatggtaaaatgaaagatctcagtccaagatggtatttctactatctaggaactgggccagaagctggacttccttatggtgctaacaaagatggcatcatatgggttgcaactgagggagccttgaatacaccaaaagatcacattggcaccagaaatcctgctaacaatgctgcaatcgtgctacaacttcctcaaggaacaacattaccaaaaggtttttacgcagaagggtctagaggtggaagtcaagcctcttctagatcatcatcacgtagtcgcaacagttcaagaaattcaactccaggttcaagtagaggaacttctcctgctagaatggctggaaatggaggtgatgctgctcttgctttgttactacttgacagattgaaccagcttgagagcaaaatgtctggtaaaggccaacaacaacaaggccaaactgtcactaagaaatctgctgctgaggcttctaagaagcctagacaaaaacgtactgccactaaagcatacaatgtaacacaagctttcggcagacgtggtccagaacaaactcaaggaaattttggggatcaggaactaatcagacaaggaactgattacaaacattggccgcaaattgcacaatttgctccttctgcttcagcgttctttggaatgtcgagaattggaatggaagtcacaccttcgggaacatggttgacctatacaggtgccatcaaattggatgacaaagatccaaatttcaaagatcaagtcattttgctgaataagcatattgacgcatacaaaacattcccaccaacagagcctaaaaaggacaaaaagaagaaggctgatgaaactcaagccttaccgcagagacagaagaaacagcaaactgtgactcttcttcctgctgcagatttggatgatttctccaaacaattgcaacaatccatgagcagtgctgactcaactcaggcctaaactcatgcagaccacacaaggcagatgggctatataaacgttttcgcttttccgtttacgatatatagtctactcttgtgcagaatgaattctcgtaactacatagcacaagtagatgtagttaactttaatctcacatagcaatctttaatcagtgtgtaacattagggaggacttgaaagagccaccacattttcaccgaggccacgcggagtacgatcgagtgtacagtgaacaatgctagggagagctgcctatatggaagagccctaatgtgtaaaattaattttagtagtgctatccccatgtgattttaatagcttcttaggagaatgacaaaaaaaaacaaaaaaaa

SEQ ID NO: 43 - DNA, 29152 bp, Artificial Sequence
  Synthesis optimized sequence E-protein ORF6, and ORF8 triple deletion
caaatataacgaaaggctcagtcgaaagactgggcctttcgttttatctgttgtttgtcgtaatacgactcactatagggattaaaggtttataccttcccaggtaacaaaccaaccaactttcgatctcttgtagatctgttctctaaacgaactttaaaatctgtgtggctgtcactcggctgcatgcttagtgcactcacgcagtataattaataactaattactgtcgttgacaggacacgagtaactcgtctatcttctgcaggctgcttacggtttcgtccgtgttgcagccgatcatcagcacatctaggtttcgtccgggtgtgaccgaaaggtaagatggagagccttgtccctggtttcaacgagaaaacacacgtccaactcagtttgcctgttttacaggttcgcgacgtgttagtacgtggttttggagattcagtggaagaagtcttatcagaggcacgtcaacatcttaaagatggcacttgtggcttagtagaagttgaaaaaggcgttttgcctcaacttgaacagccctatgtgttcatcaaacgttctgatgctagaactgcacctcatggtcatgttatggttgagctggtagcagaattagaaggtattcagtacggtcgtagtggtgagacattaggtgttttagttcctcatgtgggcgaaataccagtggcttaccgcaaagttcttcttagaaagaacggtaataaaggagctggtggccatagttacggcgctgatttaaagtcatttgacttaggcgacgagcttggcactgatccttatgaagatttccaagaaaactggaacactaaacatagcagtggtgttacccgtgaactcatgcgtgagttaaatggaggtgcatacactcgctatgtcgataacaacttctgtggacctgatggttaccctcttgagtgcattaaagaccttctagcacgtgctggtaaagcttcatgcactttgtccgaacaactggactttattgacactaagaggggtgtatactgctgccgtgaacatgagcatgaaattgcttggtacacggaacgttctgaaaagagctatgaattgcagacaccttttgaaattaaactggcaaagaaatttgacaccttcaatggggaatgtccaaattttgtatttcccctcaattccataatcaagactattcaaccaagggttgaaaagaaaaagcttgatggctttatgggtagaattcgatctgtctatccagttgcgtcaccaaatgaatgcaaccaaatgtgcctttcaactctcatgaagtgtgatcattgtggtgaaacttcatggcagacgggcgattttgttaaagccacttgcgaattttgtggcactgagaatttgactaaagaaggtgccactacttgtggttacttaccccaaaatgctgttgttaaaatttactgtccagcatgtcacaattcagaagtaggacctgagcatagtcttgccgaataccataatgaatctggcttgaaaaccattcttcgtaagggtggtcgcactattgcttttggaggatgtgtgttctcttatgttggttgccataacaagtgtgcttattgggttccacgtgcttcagctaacataggttgtaaccatacaggtgttgttggagaaggttccgaaggtcttaatgacaaccttcttgaaatactccaaaaagagaaagtcaacatcaatattgttggtgactttaaacttaatgaagagatcgccattattttggcatctttttctgcttccacaagtgcttttgtggaaactgtgaaaggtttggattataaagcattcaaacagattgttgaatcctgtggtaattttaaggttacaaagggaaaagctaaaaaaggtgcctggaatattggtgaacagaaatcaatactgagtcctctttatgcatttgcatcagaggctgctcgtgttgtacgatcaattttctcccgcactcttgaaactgctcaaaattctgtgcgtgttttacagaaggccgctataacaatactagatggaatttcacagtattcactgagactcattgatgctatgatgttcacatctgatttggctactaacaatctagttgtaatggcctacattacaggtggtgttgttcagttgacttcgcagtggctaactaacatctttggcactgtttatgaaaaactcaaacccgtccttgattggcttgaagagaagtttaaggaaggtgtagagtttcttagagacggttgggagattgttaaattcatctcaacctgtgcttgtgaaattgtcggtggacaaattgtcacctgtgctaaggaaattaaggagagtgttcagacattctttaagcttgtaaacaagtttttggctttgtgtgctgactctatcattattggtggagctaaacttaaagccttgaatttaggtgaaacatttgtcacgcactcaaagggattgtacagaaagtgtgttaaatccagagaagaaactggcctactcatgcctctaaaagccccaaaagaaattatcttcttagagggagaaacacttcccacagaagtgttaacagaggaagttgtcttgaaaactggtgatttacaaccattagaacaacctactagtgaagctgttgaagctccattggttggtacaccagtttgtattaacgggcttatgttgctcgaaatcaaagacacagaaaagtactgtgcccttgcacctaatatgatggtaacaaacaataccttcacactcaaaggcggtgcaccaacaaaggttacttttggtgatgacactgtgatagaagtgcaaggttacaagagtgtgaatatcacttttgaacttgatgaaaggattgataaagtacttaatgagaagtgctctgcctatacagttgaactcggtacagaagtaaatgagttcgcctgtgttgtggcagatgctgtcataaaaactttgcaaccagtatctgaattacttacaccactgggcattgatttagatgagtggagtatggctacatactacttatttgatgagtctggtgagtttaaattggcttcacatatgtattgttctttctaccctccagatgaggatgaagaagaaggtgattgtgaagaagaagagtttgagccatcaactcaatatgagtatggtactgaagatgattaccaaggtaaacctttggaatttggtgccacttctgctgctttacaacctgaagaagaacaagaagaagattggttagatgatgatagtcaacaaactgttggtcaacaagacggcagtgaggacaatcagacaactactattcaaacaattgttgaggttcaacctcaattagagatggaacttacaccagttgttcagactattgaagtgaatagttttagtggttatcttaaacttactgacaatgtatacatcaagaatgcagacattgtggaagaagctaaaaaggtaaaaccaacagtggttgttaatgcagccaatgtttaccttaaacatggaggaggtgttgcaggagccttaaataaggctactaacaatgccatgcaagttgaatctgatgattacatagctactaatggaccacttaaagtgggtggtagttgtgttttaagcggacacaatcttgctaaacactgtttacatgttgtcggcccaaatgttaacaaaggtgaagatattcaacttcttaagagtgcttatgaaaattttaaccagcacgaagttctacttgcaccattattatcagctggtatttttggtgctgaccctatacattctttaagagtttgtgtagatactgttcgcacaaatgtctacttagctgtctttgataaaaatctctatgacaaacttgtttcaagctttttggaaatgaagagtgaaaagcaagttgaacaaaagatcgctgagattcctaaagaggaagttaagccatttataactgaaagtaaaccttcagttgaacagagaaaacaagatgataagaagatcaaagcttgtgttgaagaagttacaacaactctggaagaaactaagttcctcacagaaaacttgctcctttatatcgacattaatggcaatcttcatccagattctgccactcttgttagtgacattgacatcactttcttaaagaaagatgctccatatatagtgggtgatgttgttcaagagggtgttttaactgctgtggttatacctactaaaaaggctggtggcactactgaaatgctagcgaaagctttgagaaaagtgccaacagacaattatataaccacttacccgggtcagggtttaaatggttacactgtagaggaggcaaagacagtgcttaaaaagtgtaaaagtgccttttacattctaccatctattatctctaatgagaagcaagaaattcttggaactgtttcttggaatttgcgagaaatgcttgcacatgcagaagaaacacgcaaattaatgcctgtctgtgtggaaactaaagccatagtttcaactatacagcgtaaatataagggtatcaagatacaagagggtgtggttgattatggtgctagattttacttttacaccagtaaaacaactgtagcgtcacttatcaacacacttaacgatctaaatgaaactcttgttacaatgccacttggctatgtaacacatggcttaaatttggaagaagctgctcggtatatgagatctctcaaagtgccagctacagtttctgtttcttcacctgatgctgttacagcgtataatggttatcttacttcttcttctaaaacacctgaagaacattttattgaaaccatctcacttgctggttcctataaagattggtcctattctggacaatctacacaactaggtatagaatttcttaagagaggtgataaaagtgtatattacacgtccaatcctaccacattccacctagatggtgaagttatcacctttgacaatcttaagacacttctttctttgagagaagtgaggactattaaggtgtttacaacagtagacaacattaacctccacacgcaagttgtggacatgtcaatgacatatggacaacagtttggtccaacttatttggatggagctgatgttactaagataaaacctcataactcacatgaaggtaaaacattttacgttttgcctaatgatgacactctacgtgttgaggcttttgagtactaccacacaactgatcctagttttctgggtaggtacatgtcagcattaaatcacactaaaaagtggaaatacccacaagttaatggtttaacttcgattaaatgggcagataacaactgttatcttgccactgcattgttaacactccaacaaatagagttgaagtttaatccacctgctctacaagatgcttattacagagcaagggctggtgaagctgctaacttttgtgcacttatcttagcctactgtaataagacagtaggtgagttaggtgatgttagagaaacaatgagttacttgtttcaacatgccaatttagattcttgcaaaagagtcttgaacgtggtgtgtaaaacttgtggacaacagcagacaacccttaagggtgtagaagctgttatgtacatgggcacactttcttatgaacaattcaagaaaggtgttcagataccttgtacgtgtggtaaacaagctacaaaatatctagtacaacaggagtcaccttttgttatgatgtcagcaccacctgctcagtatgaacttaagcatggtacatttacttgtgctagtgagtacactggtaattaccagtgtggtcactataagcatataacttctaaggaaactttgtattgcatagacggtgctttacttacaaagtcctcagaatacaaaggtcctattacggatgttttctacaaagaaaacagttacacaacaaccataaaaccagttacttataagttggatggtgttgtttgtacagaaattgaccctaagttggacaattattataagaaggacaactcttatttcacagagcaaccaattgatcttgtaccaaaccaaccatatccaaacgcaagcttcgataattttaagttcgtatgcgataatatcaaatttgctgatgatctcaaccagttaactggttataagaaacctgcttcaagagagcttaaagttacatttttccctgacttaaatggtgatgtggtggctattgattataaacactacacaccctcttttaagaaaggagctaaattgttacataagcctattgtttggcatgttaacaatgcaactaataaagccacgtataaaccaaatacctggtgtatacgttgtctttggagcacaaaaccagttgaaacatcaaattcgtttgatgtactgaagtcagaggacgcgcagggaatggataatcttgcatgtgaagatctaaaaccagtctctgaagaagtagtggaaaatcctaccatacagaaagacgttcttgagtgtaatgtgaaaactaccgaagttgtaggagacattatacttaaaccagcaaataatagtttgaagatcacagaagaggttggccacacagatctaatggctgcttatgtagacaattctagtcttactattaagaaacctaatgaactctctagagtattaggtttgaaaacccttgctactcatggtttagctgctgttaatagtgtcccttgggatactatagctaattatgctaagccttttcttaacaaagttgttagtacaactactaacatagttacacggtgtcttaatcgtgtttgtactaattatatgccttacttctttactttattgctacaattgtgtacttttactagaagtacaaattctagaatcaaggcatctatgccgactactatagcaaagaatactgttaagagtgtcggtaaattttgtctagaggcttcatttaattatctcaagtcacctaacttttctaagctgataaacattatcatctggtttttgctattaagtgtttgcctaggttctttaatctactcaaccgctgctttaggtgttttaatgtctaatttaggcatgccttcttactgtactggttacagagaaggctatttgaactctactaatgtcactattgcaacctactgtactggatctataccttgtagtgtttgtcttagtggtttagattctttagacacctatccttctcttgaaactatacagattaccatttcatctttcaaatgggatttaactgcttttggcttagttgcagagtggtttttggcatatattcttttcactaggtttttctatgtacttggattggctgcaatcatgcaattgtttttcagctattttgcagtccattttattagtaactcttggcttatgtggcttataattaatcttgtgcagatggccccgatttcagctatggttagaatgtacatcttctttgcctcattttattatgtgtggaaaagttatgtgcatgttgtagacggttgtaattcatcaacttgtatgatgtgttacaaacgtaatagagcaacaagagtcgaatgtacaactattgttaatggtgttagaaggtccttttatgtctatgctaatggaggtaaaggcttttgcaaactacacaattggaattgtgttaattgtgatacattctgtgctggtagtacatttattagtgatgaagttgcgagagacttgtcactacagtttaaaagaccaataaatcctactgaccaatcttcttacatcgttgatagtgttacagtgaagaatggttccatccatctttactttgataaagctggtcaaaagacttatgaaagacattctctctctcattttgttaacttagacaacctgagagctaataacactaaaggttcattgcctattaatgttatcgttttcgacggtaaatcaaaatgtgaagaatcatctgcaaaatcagcgtctgtttactacagtcagcttatgtgtcaacctatactgttactagatcaggcattagtgtctgatgttggtgatagtgcggaagttgcagttaaaatgtttgatgcttacgttaatacgttttcatcaacttttaacgtaccaatggaaaaactcaaaacactagttgcaactgcagaagctgaacttgcaaagaatgtgtccttagacaatgtcttatctacgtttatttcagcagctcggcaagggtttgttgattcagatgtagaaactaaagatgttgttgaatgtcttaaattgtcacatcaatctgacatagaagttactggcgatagttgtaataactatatgctcacctataacaaagttgaaaacatgacaccccgtgaccttggtgcttgtattgactgtagtgctagacatattaatgcgcaggtagcaaaaagtcacaacattgctttgatatggaacgttaaagatttcatgtcattgtctgaacaactacgaaaacaaatacgtagtgctgctaaaaagaataacttacccttcaagttgacatgtgcaactactagacaagttgttaatgttgtaacaacaaagatagcacttaagggtggtaaaattgtgaataactggttgaagcagcttattaaagttacacttgtgttcctttttgttgctgctattttctatctgataacacctgttcatgtcatgtctaaacatactgacttttcaagtgaaatcataggatacaaggctattgatggtggtgtcactcgtgacatagcatctacagatacttgttttgctaacaaacatgctgattttgacacatggtttagccagcgtggtggtagttatactaatgacaaagcttgcccattgattgctgcagtcataacaagagaagtgggttttgtcgttcctggtttgcctggaacgatattacgcacaactaatggtgactttttgcatttcttacctagagtttttagtgcagttggtaacatctgttacacaccatcaaaacttatagagtacactgactttgcaacatcagcttgtgttttggctgctgaatgtacaatttttaaagacgcttctggtaagccagtaccatattgttatgataccaatgtactagaaggttctgttgcttatgaaagtttacgccctgacacacgttatgtgctcatggatggctctattattcaatttcctaacacctaccttgaaggttctgtaagagtggtaacaacttttgattctgagtactgtaggcacggcacttgtgaaagatcagaagctggtgtttgtgtatctactagtggtagatgggtacttaacaacgattattacagatctttaccaggagttttctgtggtgtagatgctgtaaatttgcttactaacatgtttacaccactaattcaacctattggtgctttggacatatcagcatctatagtagctggtggtattgtagctatcgtagtaacatgccttgcctactattttatgaggtttagacgtgcttttggtgaatacagtcatgtagttgcctttaatactctcctattccttatgtcattcactgtactctgtttaacaccagtttactcattcttacctggtgtttattctgttatttacctgtacttgacattttatctgactaatgatgtttcttttctcgcacatattcagtggatggttatgttcacacctttagtacctttctggataacaattgcttacatcatttgtatttccacaaagcatttctattggttctttagtaattacctaaagagacgtgtagtctttaatggtgtttcctttagtacttttgaagaagctgcgctgtgcacctttttgttaaataaggagatgtatctaaagttgcgtagtgatgtgctattacctcttacgcaatataatagatacttagctctttataacaagtacaagtatttcagtggagcaatggatacaactagctacagagaagctgcttgttgtcatctcgcaaaggctctcaatgacttcagtaactcaggttctgatgttctttaccaaccaccacaaacctctatcacctcagctgttttgcagagtggttttagaaaaatggcattcccatctggtaaagttgagggttgtatggtacaagtaacttgtggtacaactacacttaacggtctttggcttgatgacgtagtttactgtccaagacatgtgatctgcacctctgaagatatgcttaaccctaattatgaagatctactcatccgtaagtctaatcataacttcttggtacaggctggtaatgttcaactcagggttattggacattctatgcaaaattgtgtacttaagcttaaggttgatacagccaatcctaagacacctaagtataagtttgttcgcattcaaccaggacagactttttcagtgttagcttgttacaatggttcaccatctggtgtttaccaatgtgctatgaggcccaatttcactattaagggttcattccttaatggttcatgtggtagtgttggttttaacatagattatgactgtgtctctttttgttacatgcaccatatggaattaccaactggagttcatgctggcacagacttagaaggtaacttttatggaccttttgttgacaggcaaacagcacaagcagctggtacagatacaactattacagttaatgttcttgcttggttgtacgctgctgttataaatggagacaggtggtttctcaatcgatttaccacaactcttaatgactttaaccttgtggctatgaagtacaattatgaacctctaacacaagaccatgttgacatactaggacctctttctgctcaaactggaattgccgttttagatatgtgtgcttcattaaaagaacttctgcaaaatggtatgaatggacgtaccatattgggtagtgctttattagaagatgagtttacaccttttgatgttgttagacaatgctcaggtgttactttccaaagtgcagtgaaaagaacaatcaagggtacacaccactggttgttactcacaattttgacttcacttttagttttagtccagagtactcaatggtctttgttctttttcttctacgaaaatgcctttttaccttttgctatgggtattattgctatgtctgcttttgcaatgatgtttgtcaaacataagcatgcatttctctgtttgtttttgttaccttctcttgccactgtagcttactttaatatggtctacatgcctgctagttgggtgatgcgtattatgacatggttggatatggttgatactagtttgtctggttttaagctaaaagactgtgttatgtatgcatcagctgtagtgttactaatccttatgacagcaagaactgtgtatgatgatggtgctaggagagtgtggacacttatgaatgtcttgacactcgtttataaagtttactatggcaacgctttagatcaagccatttccatgtgggctcttataatctctgttacttctaactactcaggtgtagttacaactgtcatgtttttggccagaggtattgtttttatgtgtgttgagtattgccctattttcttcataactggtaatacacttcagtgtataatgctagtctattgtttcttaggctatttttgtacttgttacttcggcctcttttgtttactcaaccgctactttagactgactcttggtgtttatgattacttagtgtctacacaggagtttagatatatgaattcacagggactactcccacccaagaatagcatagatgccttcaaactcaacattaaattgttgggtgttggtggcaaaccttgtatcaaagtagccactgtacagtctaaaatgtcagatgtaaagtgcacatcagtagtcttactctcagttttgcaacaactcagagtagaatcatcatctaaattgtgggctcaatgtgtccagttacacaatgacattctcttagctaaagatactactgaagcctttgaaaaaatggtttcactactttctgttttgctttccatgcagggtgctgtagacataaacaagctttgtgaagaaatgctggacaacagggcaaccttacaagctatagcctcagagtttagttcccttccatcatatgcagcttttgctactgctcaagaagcttatgagcaggctgttgctaatggtgattctgaagttgttcttaaaaagttgaagaagtctttgaatgtggctaaatctgaatttgaccgtgatgcagccatgcaacgtaagttggaaaagatggctgatcaagctatgacccaaatgtataaacaggctagatctgaggacaagagggcaaaagttactagtgctatgcagacaatgcttttcactatgcttagaaagttggataatgatgcactcaacaacattatcaacaatgcaagagatggttgtgttcccttgaacataatacctcttacaacagcagccaaactaatggttgtcataccagactacaacacatataagaatacgtgtgatggtacaacatttacttatgcatcagcattgtgggaaatccaacaggttgtagatgcagatagtaaaattgttcagcttagtgaaattagtatggacaattcacctaatttagcatggcctcttattgtaacagctttaagggccaattctgctgtcaaattacagaataatgagcttagtcctgttgcactaagacaaatgtcttgtgctgccggtactacacaaactgcttgcactgatgacaatgcgttagcttactacaacacaacaaagggaggtaggtttgtacttgcactgttatccgatttacaggatttgaaatgggctagattccctaagagtgatggaactggtactatctatacagaactggaaccaccttgtaggtttgttacagacacacctaaaggtcctaaagtgaagtatctttacttcatcaaaggattaaacaacctaaatagaggtatggtacttggtagtttagctgccacagtacgtttacaagctggtaatgcaacagaagttcctgctaattcaactgtactttctttctgtgcttttgctgtagatgctgctaaagcttacaaagattatctagctagtgggggacaaccaatcactaattgtgttaagatgttgtgtacacacactggtactggtcaggcaataacagttacaccggaagccaatatggatcaagaatcctttggtggtgcatcgtgttgtctgtactgccgttgtcatatagatcatccaaatcctaaaggattttgtgacttaaaaggtaagtatgtacaaatacctacaacttgtgctaatgaccctgtgggttttacacttaaaaacacagtctgtaccgtctgcggtatgtggaaaggttatggttgtagttgtgatcaactccgcgaacccatgcttcagtcagctgatgcacaatcgtttttaaacgggtttgcggtgtaagtgcagcccgtcttacaccgtgcggcacaggcactagtactgatgtcgtatatagagcttttgacatctacaatgataaagtagctggttttgctaagttcctaaaaactaattgttgtcgcttccaagaaaaggacgaagatgacaatctcattgattcttactttgtagttaagagacacactttctctaactaccaacatgaagaaacaatttacaacctgcttaaggattgtccagctgttgctaaacatgacttctttaagtttagaatagacggtgacatggtaccacatatatcacgtcaacgtcttactaaatacacaatggcagacctcgtctatgctttaaggcattttgatgaaggtaattgtgacacattaaaagaaatacttgtcacatacaattgttgtgatgatgactacttcaataaaaaggactggtatgattttgtagaaaacccagatatattacgcgtatacgccaacttaggtgaacgtgtacgccaagctttgttaaaaacagtacagttctgtgatgccatgcgaaatgctggtattgttggtgtactgacattagataatcaagatctcaatggtaactggtatgactttggtgatttcatacaaaccacgccaggtagtggagttcctgttgtagactcttattattcattgctcatgcctatattaaccttgaccagggctttaactgcagagtcacatgttgacactgacttaacaaagccttacattaagtgggatttgttaaaatacgacttcacggaagagaggttaaaactctttgaccgttattttaaatactgggatcagacataccacccaaattgtgttaactgtttggatgacagatgcattctgcattgtgcaaactttaatgttctgttctctacagtgttcccacctacaagttttggaccactagtgagaaaaatatttgttgatggtgttccatttgtagtttcaactggataccacttcagagagctaggtgttgtacataatcaggatgtaaacttacatagctctagacttagttttaaggaattacttgtgtatgctgctgatcctgctatgcatgctgcttctggtaatctattactagataaacgcactacgtgcttttcagtagctgcacttactaacaatgttgcttttcaaactgtcaaacccggtaattttaacaaggacttctatgactttgctgtgtctaagggtttctttaaggaaggaagttctgttgaattaaaacacttcttctttgctcaggatggtaatgctgctatcagcgattatgactactatcgttataatctaccaacaatgtgtgatatcagacaactactatttgtagttgaagttgttgataagtactttgattgttacgatggtggctgtattaatgctaaccaagtcatcgtcaacaacctagacaaatcagctggttttccatttaataaatggggtaaggctagactttattatgattccatgagttatgaggatcaagatgcacttttcgcatatacaaaacgtaatgtcatccctactataactcaaatgaaccttaagtatgccattagtgcaaagaatagagctcgcaccgtagctggtgtctctatctgtagtactatgaccaatagacagtttcatcaaaaattactcaagtcaatagccgccactagaggagctactgtagtaattggaacaagcaaattctatggtggttggcacaacatgctcaaaactgtttatagtgatgtagaaaaccctcaccttatgggttgggattatcctaaatgtgatagagccatgcctaacatgcttagaattatggcctcacttgttcttgctcgcaaacatacaacgtgttgtagcttgtcacaccgtttctatagattagctaatgagtgtgctcaagtattgagtgaaatggtcatgtgtggcggttcactatatgttaaaccaggtggaacctcatcaggagatgccacaactgcttatgctaatagtgtgtttaacatttgtcaagctgtcacggccaatgttaatgcacttttatctactgatggtaacaaaattgccgataagtatgtccgcaatttacaacacagactttatgagtgtctctatagaaatagagatgttgacacagactttgtgaatgagttttacgcatatttgcgtaaacatttctcaatgatgatactctctgacgatgctgttgtgtgtttcaatagcacttatgcatctcaaggtctagtggctagcataaagaactttaagtcagttctttactatcaaaacaacgtttttatgtctgaagcaaaatgttggactgagactgaccttactaaaggacctcatgaattttgctctcaacatacaatgctagttaaacagggtgatgattatgtgtaccttccttacccagatccatcaagaatcctaggtgccggttgttttgtagatgatatcgtaaaaacagatggtacacttatgattgaacggttcgtgtctttagctatagatgcttacccacttactaaacatcctaatcaggagtatgctgatgtctttcatttgtacttacaatacatacgtaagctacatgatgagttaacaggacacatgttagacatgtattctgttatgcttactaatgataacacttcaaggtattgggaacctgagttttatgaggctatgtacacaccgcatacagtcttacaagctgttggtgcttgtgttctttgcaattcacagacttcattaagatgtggtgcttgcatacgtagaccattcttatgttgtaaatgctgttacgaccatgtcatctcaacatcacataaattagtcttgtctgttaatccgtatgtttgcaatgctccaggttgtgatgtcacagatgtgactcaactttacttaggaggtatgagctattactgtaagtcacataaaccacccattagttttccattgtgtgctaatggacaagtttttggtctctacaagaatacatgtgttggtagcgataatgttactgactttaatgcaattgcaacatgtgactggacaaatgctggtgattacattttagctaacacctgtactgaaagactcaagctttttgcagcagaaacgctcaaagctactgaggagacatttaaactgtcttatggtattgctactgtacgtgaagtgctgtctgacagagaattacatctttcatgggaagttggtaaacctagaccaccacttaaccgaaattatgtctttactggttatcgtgtaactaaaaacagtaaagtgcaaatcggagagtacacctttgaaaaaggtgactatggtgatgctgttgtttaccgaggtacaacaacttacaaactcaacgttggtgattattttgtgctgacatcacatacagtaatgccattaagtgcacctacactagtgccacaagagcactatgttagaattactggcttatacccaacactcaatatctcagatgagttttctagcaatgttgcaaattatcaaaaggttggtatgcaaaagtattctacactccagggaccacctggtactggtaaaagtcattttgctattggtctagctctctactacccttctgctcgcatagtatatacagcttgctctcatgcagctgttgatgcactatgtgagaaggcattaaaatatttgcccatagacaaatgtagtagaattatacctgcacgtgctcgtgtagagtgttttgataaattcaaggtgaattcaacattagaacagtatgtcttttgtactgtaaatgcattgcctgagacgacagcagatatagttgtctttgatgaaatttcaatggccacaaattatgatttgagtgttgtcaatgccagattacgtgctaagcactatgtgtacattggtgatcctgctcaattacctgcaccacgcacattactaactaagggtacactagaaccagaatatttcaattcagtgtgtagacttatgaaaactataggtccagacatgttcctcggaacttgtcgtagatgtcctgctgaaattgttgacactgtgagtgctttggtttatgataataagcttaaggcacataaagacaaatcagctcaatgctttaaaatgttctacaagggtgttatcacgcatgatgtttcatctgcaattaacaggccacaaataggcgtggtaagagaattccttacacgtaaccctgcttggagaaaagctgtctttatttcaccttacaattcccagaatgctgtagcctcaaagattttgggactaccaactcaaactgttgattcatcacagggctcagaatatgactatgtcatattcactcaaaccactgaaacagctcactcttgtaatgtaaacagattcaacgttgctattaccagagcaaaagtaggcatactttgcataatgtctgatagagacctttatgacaagttgcaatttacaagtcttgaaattccacgtaggaatgtggcaactttacaagctgaaaatgtaacaggactctttaaagattgtagtaaggtaatcactgggttacatcctacacaggcacctacacacttaagtgttgatactaaattcaaaactgaaggtttatgtgttgacatacctggcatacctaaggacatgacctatagaagattaatctctatgatgggtttcaaaatgaattaccaggttaatggttaccctaacatgtttatcacccgcgaagaagctataagacatgtacgtgcatggattggcttcgatgtcgaaggttgtcatgctactagagaagctgttggtaccaatttacctttacagctaggtttttctacaggtgttaacctagttgctgtacctacaggttatgttgatacacctaataatacagatttttccagagttagtgctaaaccaccgcctggagatcaatttaaacacctcataccacttatgtacaaaggacttccttggaatgtagtgcgtataaagattgtccaaatgttaagtgacacacttaaaaatctctctgacagagtcgtatttgtcttatgggcacatggctttgagttgacatctatgaagtattttgtgaagatcggacctgagcgcacatgttgtctatgtgatagacgtgctacatgcttttccactgcttcagacacttatgcctgttggcatcattctattggatttgattacgtctataatccgtttatgattgatgttcaacaatggggttttacaggtaacctacaaagcaaccatgatctgtattgtcaagtccatggtaatgcacatgtagctagttgtgatgcaatcatgactaggtgtctagctgtccacgagtgctttgttaagcgtgttgactggactattgaatatcctataatcggtgatgaactgaagattaatgcggcttgtagaaaggttcaacacatggttgttaaagctgcattattagcagacaaattcccagttcttcacgacattggtaaccctaaagctattaagtgtgtacctcaagctgatgtagaatggaagttctatgatgcacagccttgtagtgacaaagcttacaaaatagaagaactgttctattcttatgccacacattctgacaaattcacagatggtgtatgcctattttggaattgcaatgtcgatagatatcctgctaattccattgtttgtagatttgacactagagtgctatctaaccttaacttgcctggttgtgatggtggcagtttgtatgtaaataagcatgcattccacacaccagcttttgataaaagtgcttttgttaatctaaagcaacttccatttttctattactctgacagtccatgtgagtctcatggaaaacaagtagtgtcagatatagattatgtaccactaaagtctgctacgtgtataacacgttgcaatttaggtggtgctgtctgtagacatcatgctaatgagtacagattgtatctcgatgcttataacatgatgatctcagctggctttagcttgtgggtttacaaacaatttgatacctataacctctggaacacttttacaagacttcagagtttagaaaatgtggcttttaatgttgtaaataagggacactttgatggacaacagggtgaagtaccagtttctatcattaacaacactgtttacacaaaagttgatggtgttgatgtagaattgtttgagaacaaaaccacattacctgttaatgtagcatttgagctttgggctaagcgcaacattaaaccagtaccagaggtgaaaatactcaataatttgggtgtggacattgctgctaatactgtgatctgggactacaaaagagatgctccagcacatatatctactattggtgtttgttctatgactgacatagccaagaaaccaactgaaacgatttgtgcaccactcactgtcttttttgatggtagagttgatggtcaagtagacttatttagaaatgcccgtaatggtgttcttattacagaaggtagtgttaaaggtttacaaccatctgtaggtcccaaacaagctagtcttaatggagtcacattaattggagaagccgtaaaaacacagttcaattattacaagaaagtggatggtgttgtccaacaattacctgaaacttactttactcagagtagaaacttacaggaatttaagcccaggagtcaaatggaaattgatttcttagaacttgctatggatgaattcattgaacggtataaattagaaggctatgccttcgaacatatcgtttatggagattttagtcatagtcagttaggtggtttacatctactgattggactagctaaacgttttaaggaatcaccttttgaacttgaagattttattcctatggacagtacagttaaaaactacttcataacagatgcgcaaacaggttcatctaagtgtgtgtgttctgttattgatcttttacttgatgacttcgttgaaataataaagtcccaagatttatctgtagtttctaaggttgtcaaagtgactattgactatacagaaatctcatttatgctttggtgtaaagatggccatgtagaaacattttacccaaaattacaatctagtcaagcgtggcaaccgggtgttgctatgcctaatctttacaaaatgcaaagaatgctattagaaaagtgtgaccttcaaaattatggtgatagtgcaacattacctaaaggcataatgatgaatgtcgcaaaatatactcaactgtgtcaatatttaaacacactgacattagctgtaccctataatatgagagttatccattttggtgctggttctgataaaggagttgcaccaggtacagctgttttaagacaatggttgcctacaggtacgctgcttgtcgattcagatcttaatgactttgtctctgatgcagattcaactttgattggtgattgtgcaactgtacatacagctaataaatgggatctcattattagtgatatgtacgaccctaagactaagaatgtcacaaaagaaaacgactctaaagagggttttttcacttacatttgtgggtttatacaacaaaagctagctcttggaggttccgtggctataaagataacagaacattcttggaatgctgatctttataagctcatgggacacttcgcatggtggacagcctttgttactaatgtgaatgcgtcatcatctgaagcatttttaatcggatgtaactaccttggcaaaccacgcgaacaaatagatggttatgtcatgcatgcaaattacatattttggaggaatacaaatccaattcagctttcttcttattctttattcgacatgagtaaattcccccttaaattaaggggtactgctgttatgtctttaaaagaaggtcaaatcaatgatatgattctctctcttcttagtaaaggtagacttataattagagaaaacaacagagttgttatttctagtgatgttcttgttaacaactaaacgaacaatgtttgtttttcttgttttattgccactagtctctagtcagtgtgttaatcttacaaccagaactcaattaccccctgcatacactaattctttcacacgtggtgtttattaccctgacaaagttttcagatcctcagttttacattcaactcaggacttgttcttacctttcttttccaatgttacttggttccatgctatacatgtctctgggaccaatggtactaagaggtttgataaccctgtcctaccatttaatgatggtgtttactttgcttccactgagaagtctaacataataagaggctggatttttggtactactttagattcgaaaacccagtccctacttattgttaataacgctactaatgttgttatcaaagtctgtgaatttcaattttgtaacgatccatttttgggtgtttattaccacaaaaacaacaaaagttggatggaaagtgagttcagagtttattctagtgcgaataattgcacttttgaatacgtctctcagccttttcttatggaccttgaaggaaaacagggtaatttcaaaaatcttagggaatttgtgttcaagaatattgatggttacttcaagatatactctaagcacacgcctattaatttagtgcgtgatctccctcagggtttttcggctttagaaccattggtagatttgccaataggtattaacatcactaggtttcaaactttacttgctttacatagaagttatttaactcctggtgattcttcttcaggttggacagctggtgctgcagcttattatgtgggttatcttcaacctaggacttttctactgaagtacaatgaaaatggaaccattacagatgctgtagactgtgcacttgaccctctctcagaaacaaagtgtacgttgaaatccttcactgtagaaaaaggaatctatcaaacttctaactttagagtccaaccaacagaatctattgttagatttcctaacatcacaaacttgtgcccttttggtgaagtttttaacgccaccagatttgcatctgtttatgcttggaacaggaagagaatcagcaactgtgttgctgattattctgtcctgtataattccgcatcattttccacttttaagtgttatggagtgtctcctactaaattaaatgatctctgctttactaatgtctatgcagattcatttgtaattagaggtgatgaagtcagacaaatcgctccagggcaaactggaaagattgctgattataactacaaattaccagatgattttacaggctgcgttatagcttggaattctaacaatcttgattctaaggttggtggtaattataattacctgtacagattgtttaggaagtctaatctcaaaccttttgagagagatatttcaactgaaatctatcaggccggtagcacaccttgtaatggtgttgaaggttttaattgttactttcctctgcaatcatatggtttccaacccactaatggtgttggttaccaaccatacagagtagtagtactttcttttgaacttctacatgcaccagcaactgtttgtggacctaaaaagtctactaatttggttaagaacaagtgtgtcaatttcaacttcaatggtttaacaggcacaggtgttcttactgagtctaacaaaaagtttctgcctttccaacaatttggcagagacattgctgacactactgatgctgttcgtgatccacaaacacttgagattcttgacattacaccatgttcttttggtggtgtcagtgttataacaccaggaacaaatacttctaaccaggttgctgttctttatcaggatgttaactgcacagaagtccctgttgctattcatgcagatcaacttactcctacttggcgtgtttattctacaggttctaatgtttttcaaacacgtgcaggctgtttaataggggctgaacatgtcaacaactcatatgagtgtgacatacccattggtgcaggtatatgcgctagttatcagactcagactaattctcctcggagagcaagaagtgtagctagtcaatccatcattgcctacactatgtcacttggtgcagaaaattcagttgcttactctaataactctattgccatacccacaaattttactattagcgttaccacagaaattctaccagtgtctatgaccaagacatcagtagattgtacaatgtacatttgtggtgattcaactgaatgcagcaatcttttgttgcaatatggcagtttttgtacacaattaaaccgtgctttaactggaatagctgttgaacaagacaaaaacacccaagaagtttttgcacaagtcaaacaaatttacaagacaccaccaattaaagattttggcggttttaattttagccagatactgccagatccatcaaaaccaagcaagaggtcatttattgaagatctactgttcaacaaagtgacacttgcagatgctggcttcatcaaacaatatggtgattgccttggtgatattgctgctagagacctcatttgtgcacaaaagtttaacggccttactgttttgccacctttgctcacagatgaaatgattgctcaatacacttctgcactgttagcaggtacaatcacttctggttggacttttggtgcaggtgctgcattacaaataccatttgctatgcaaatggcttataggtttaatggtattggagttacacagaatgttctctatgagaaccaaaaattgattgccaaccaatttaatagtgctattggcaaaattcaagactcactttcttccacagcaagtgcacttggaaaacttcaagatgtggtcaaccaaaatgcacaagctttaaacacgcttgttaaacaacttagctccaattttggtgcaatttcaagtgttttaaacgacatcctttcacgtcttgacaaagttgaggctgaagtgcaaattgataggttgatcacaggcagacttcaaagtttgcagacatatgtgactcaacaattaattagagctgcagaaatcagagcttctgctaatcttgctgctactaaaatgtcagagtgtgtacttggacaatcaaaaagagttgacttttgcggaaagggctatcatcttatgtcatttcctcagtcagcacctcatggtgtcgtctttttgcatgtgacttatgtccctgcacaagaaaagaacttcacaactgctcctgccatttgtcatgatggaaaagcacactttcctcgtgaaggtgtctttgtttcaaatggcacacactggtttgtaacacaaaggaatttttatgaaccacaaatcattactacagacaacacatttgtgtctggtaactgtgatgttgtaataggaattgtcaacaacacagtttatgatcctttgcaacctgaattagactcattcaaggaggagcttgataaatacttcaagaaccatacctcaccagatgttgatttaggtgacatctctggcattaatgcttcagttgtaaacattcagaaagaaatcgaccgcctcaatgaggttgccaagaatttaaatgaatctctcatcgatctccaagaacttggaaagtatgagcagtatataaaatggccatggtacatttggctaggttttatagctggcttgattgccatagtaatggtgacaattatgctttgctgtatgaccagttgctgtagttgtctcaagggctgttgttcttgtggatcctgctgcaaatttgacgaggacgactctgagccagtgctcaaaggagtcaaattacattacacataaacgaacttatggatttgtttatgagaatcttcacaattggaactgtaactttgaagcaaggtgaaatcaaggatgctactccttcagattttgttagagctactgcaacgataccgatacaagcatcacttcctttcggatggcttattgttggcgttgcacttcttgctgtttttcagagcgcttccaaaatcataaccctcaaaaagagatggcaactagcactctccaagggtgttcactttgtttgcaacttgctgttgttgtttgtaacagtttactcacatcttttgcttgttgctgctggccttgaagccccttttctctatctttatgctttagtctacttcttgcagagtataaactttgtacgcataataatgaggctttggctttgctggaaatgccgttccaaaaacccattactttatgatgccaactattttctttgctggcatactaattgttacgactattgtataccttacaatagtgtaacttcttcaattgtcattacttcaggtgatggcacaacaagtcctatttctgaacatgactaccagattggtggttatactgaaaaatgggaatctggagtaaaagactgtgttgtattacacagttacttcacttcagactattaccagctgtactcaactcaattgagtacagacactggtgttgaacatgttaccttcttcatctacaataaaatcgttgatgagcctgaagaacatgtccaaattcacacaatcgacgtttcatccggagttgttaatccagtaatggaaccaatttatgatgaaccgacgacgactactagcgtgcctttgtaagcacaagctgatgagtacgaacttatggcagattccaacggtactattaccgttgaggagctgaaaaagctccttgaacaatggaacctagtaataggtttcctattccttacatggatttgcctgctgcaatttgcctatgccaacaggaataggtttttgtacatcattaagttgattttcctctggctgttatggccagtaactttagcttgttttgtgcttgctgctgtttacagaataaattggatcaccggtggaattgctattgcaatggcttgtcttgtaggattgatgtggctaagctacttcattgcttctttcagactgtttgcgcgtacgcgttccatgtggtcattcaatccagaaactaacattcttctcaacgtgccactccatggaactattctgactagaccgcttctagaaagtgaactcgtaatcggagctgttatccttcgtggacatcttcgtattgctggacatcatctaggacgctgtgacatcaaggatctacctaaagaaatcactgttgctacatcacgaacgctttcttattacaaattgggagcttcacagcgtgtagcaggtgattcaggttttgctgcatatagtcgctacaggattggcaactataaattaaacacagaccattccagtagcagtgacaatattgctttgcttgtacagtaaacgaacatgaaaattattcttttcttggcactgataacactcgctacttgtgagctttatcactaccaagagtgtgttagaggtacaacagtacttttaaaagaaccttgctcgtcgggaacatacgagggcaattcaccatttcatcctctagctgataacaaatttgcactgacttgctttagcactcaatttgcttttgcttgtcctgacggcgtaaaacacgtctatcagttacgtgccagatcagtttcacctaaactgttcatcagacaagaggaagttcaagaactttactctccaatttttcttattgttgcggcaatagtgtttataacactttgcttcacactcaaaagaaagacagaatgattgaactttcattaattgacttctatttgtgctttttagcctttctgctattccttgttttaattatgcttattatcttttggttctcacttgaactgcaagatcataatgaaacttgtcacgcctaagacgttcgtgttgttttagatttcatctaaacgaacaaactaaaatgtctgataatggacctcaaaatcagcgaaatgcacctcgcattacgtttggtggaccatcagattcaactggcagtaaccagaatggagaacgaagtggtgcgcgatcaaaacaacgccgcccgcaaggtttacccaataatactgcgtcttggttcaccgctctcactcaacatggcaaggaagatttaaaattccctcgaggacaaggcgttccaattaacaccaatagcagtccagatgaccaaattggctactaccgccgcgccacaagacgaattcgtggtggtgatggtaaaatgaaagatctcagtccaagatggtatttctactatctaggaactgggccagaagctggacttccttatggtgctaacaaagatggcatcatatgggttgcaactgagggagccttgaatacaccaaaagatcacattggcaccagaaatcctgctaacaatgctgcaatcgtgctacaacttcctcaaggaacaacattaccaaaaggtttttacgcagaagggtctagaggtggaagtcaagcctcttctagatcatcatcacgtagtcgcaacagttcaagaaattcaactccaggttcaagtagaggaacttctcctgctagaatggctggaaatggaggtgatgctgctcttgctttgttactacttgacagattgaaccagcttgagagcaaaatgtctggtaaaggccaacaacaacaaggccaaactgtcactaagaaatctgctgctgaggcttctaagaagcctagacaaaaacgtactgccactaaagcatacaatgtaacacaagctttcggcagacgtggtccagaacaaactcaaggaaattttggggatcaggaactaatcagacaaggaactgattacaaacattggccgcaaattgcacaatttgctccttctgcttcagcgttctttggaatgtcgagaattggaatggaagtcacaccttcgggaacatggttgacctatacaggtgccatcaaattggatgacaaagatccaaatttcaaagatcaagtcattttgctgaataagcatattgacgcatacaaaacattcccaccaacagagcctaaaaaggacaaaaagaagaaggctgatgaaactcaagccttaccgcagagacagaagaaacagcaaactgtgactcttcttcctgctgcagatttggatgatttctccaaacaattgcaacaatccatgagcagtgctgactcaactcaggcctaaactcatgcagaccacacaaggcagatgggctatataaacgttttcgcttttccgtttacgatatatagtctactcttgtgcagaatgaattctcgtaactacatagcacaagtagatgtagttaactttaatctcacatagcaatctttaatcagtgtgtaacattagggaggacttgaaagagccaccacattttcaccgaggccacgcggagtacgatcgagtgtacagtgaacaatgctagggagagctgcctatatggaagagccctaatgtgtaaaattaattttagtagtgctatccccatgtgattttaatagcttcttaggagaatgacaaaaaaaaacaaaaaaaa

SEQ ID NO: 44 - DNA, 29968 bp, Artificial Sequence
  Synthesis optimized
caaatataacgaaaggctcagtcgaaagactgggcctttcgttttatctgttgtttgtcgtaatacgactcactatagggattaaaggtttataccttcccaggtaacaaaccaaccaactttcgatctcttgtagatctgttctctaaacgaactttaaaatctgtgtggctgtcactcggctgcatgcttagtgcactcacgcagtataattaataactaattactgtcgttgacaggacacgagtaactcgtctatcttctgcaggctgcttacggtttcgtccgtgttgcagccgatcatcagcacatctaggtttcgtccgggtgtgaccgaaaggtaagatggagagccttgtccctggtttcaacgagaaaacacacgtccaactcagtttgcctgttttacaggttcgcgacgtgttagtacgtggttttggagattcagtggaagaagtcttatcagaggcacgtcaacatcttaaagatggcacttgtggcttagtagaagttgaaaaaggcgttttgcctcaacttgaacagccctatgtgttcatcaaacgttctgatgctagaactgcacctcatggtcatgttatggttgagctggtagcagaattagaaggtattcagtacggtcgtagtggtgagacattaggtgttttagttcctcatgtgggcgaaataccagtggcttaccgcaaagttcttcttagaaagaacggtaataaaggagctggtggccatagttacggcgctgatttaaagtcatttgacttaggcgacgagcttggcactgatccttatgaagatttccaagaaaactggaacactaaacatagcagtggtgttacccgtgaactcatgcgtgagttaaatggaggtgcatacactcgctatgtcgataacaacttctgtggacctgatggttaccctcttgagtgcattaaagaccttctagcacgtgctggtaaagcttcatgcactttgtccgaacaactggactttattgacactaagaggggtgtatactgctgccgtgaacatgagcatgaaattgcttggtacacggaacgttctgaaaagagctatgaattgcagacaccttttgaaattaaactggcaaagaaatttgacaccttcaatggggaatgtccaaattttgtatttcccctcaattccataatcaagactattcaaccaagggttgaaaagaaaaagcttgatggctttatgggtagaattcgatctgtctatccagttgcgtcaccaaatgaatgcaaccaaatgtgcctttcaactctcatgaagtgtgatcattgtggtgaaacttcatggcagacgggcgattttgttaaagccacttgcgaattttgtggcactgagaatttgactaaagaaggtgccactacttgtggttacttaccccaaaatgctgttgttaaaatttactgtccagcatgtcacaattcagaagtaggacctgagcatagtcttgccgaataccataatgaatctggcttgaaaaccattcttcgtaagggtggtcgcactattgcttttggaggatgtgtgttctcttatgttggttgccataacaagtgtgcttattgggttccacgtgcttcagctaacataggttgtaaccatacaggtgttgttggagaaggttccgaaggtcttaatgacaaccttcttgaaatactccaaaaagagaaagtcaacatcaatattgttggtgactttaaacttaatgaagagatcgccattattttggcatctttttctgcttccacaagtgcttttgtggaaactgtgaaaggtttggattataaagcattcaaacagattgttgaatcctgtggtaattttaaggttacaaagggaaaagctaaaaaaggtgcctggaatattggtgaacagaaatcaatactgagtcctctttatgcatttgcatcagaggctgctcgtgttgtacgatcaattttctcccgcactcttgaaactgctcaaaattctgtgcgtgttttacagaaggccgctataacaatactagatggaatttcacagtattcactgagactcattgatgctatgatgttcacatctgatttggctactaacaatctagttgtaatggcctacattacaggtggtgttgttcagttgacttcgcagtggctaactaacatctttggcactgtttatgaaaaactcaaacccgtccttgattggcttgaagagaagtttaaggaaggtgtagagtttcttagagacggttgggagattgttaaattcatctcaacctgtgcttgtgaaattgtcggtggacaaattgtcacctgtgctaaggaaattaaggagagtgttcagacattctttaagcttgtaaacaagtttttggctttgtgtgctgactctatcattattggtggagctaaacttaaagccttgaatttaggtgaaacatttgtcacgcactcaaagggattgtacagaaagtgtgttaaatccagagaagaaactggcctactcatgcctctaaaagccccaaaagaaattatcttcttagagggagaaacacttcccacagaagtgttaacagaggaagttgtcttgaaaactggtgatttacaaccattagaacaacctactagtgaagctgttgaagctccattggttggtacaccagtttgtattaacgggcttatgttgctcgaaatcaaagacacagaaaagtactgtgcccttgcacctaatatgatggtaacaaacaataccttcacactcaaaggcggtgcaccaacaaaggttacttttggtgatgacactgtgatagaagtgcaaggttacaagagtgtgaatatcacttttgaacttgatgaaaggattgataaagtacttaatgagaagtgctctgcctatacagttgaactcggtacagaagtaaatgagttcgcctgtgttgtggcagatgctgtcataaaaactttgcaaccagtatctgaattacttacaccactgggcattgatttagatgagtggagtatggctacatactacttatttgatgagtctggtgagtttaaattggcttcacatatgtattgttctttctaccctccagatgaggatgaagaagaaggtgattgtgaagaagaagagtttgagccatcaactcaatatgagtatggtactgaagatgattaccaaggtaaacctttggaatttggtgccacttctgctgctttacaacctgaagaagaacaagaagaagattggttagatgatgatagtcaacaaactgttggtcaacaagacggcagtgaggacaatcagacaactactattcaaacaattgttgaggttcaacctcaattagagatggaacttacaccagttgttcagactattgaagtgaatagttttagtggttatcttaaacttactgacaatgtatacatcaagaatgcagacattgtggaagaagctaaaaaggtaaaaccaacagtggttgttaatgcagccaatgtttaccttaaacatggaggaggtgttgcaggagccttaaataaggctactaacaatgccatgcaagttgaatctgatgattacatagctactaatggaccacttaaagtgggtggtagttgtgttttaagcggacacaatcttgctaaacactgtttacatgttgtcggcccaaatgttaacaaaggtgaagatattcaacttcttaagagtgcttatgaaaattttaaccagcacgaagttctacttgcaccattattatcagctggtatttttggtgctgaccctatacattctttaagagtttgtgtagatactgttcgcacaaatgtctacttagctgtctttgataaaaatctctatgacaaacttgtttcaagctttttggaaatgaagagtgaaaagcaagttgaacaaaagatcgctgagattcctaaagaggaagttaagccatttataactgaaagtaaaccttcagttgaacagagaaaacaagatgataagaagatcaaagcttgtgttgaagaagttacaacaactctggaagaaactaagttcctcacagaaaacttgctcctttatatcgacattaatggcaatcttcatccagattctgccactcttgttagtgacattgacatcactttcttaaagaaagatgctccatatatagtgggtgatgttgttcaagagggtgttttaactgctgtggttatacctactaaaaaggctggtggcactactgaaatgctagcgaaagctttgagaaaagtgccaacagacaattatataaccacttacccgggtcagggtttaaatggttacactgtagaggaggcaaagacagtgcttaaaaagtgtaaaagtgccttttacattctaccatctattatctctaatgagaagcaagaaattcttggaactgtttcttggaatttgcgagaaatgcttgcacatgcagaagaaacacgcaaattaatgcctgtctgtgtggaaactaaagccatagtttcaactatacagcgtaaatataagggtatcaagatacaagagggtgtggttgattatggtgctagattttacttttacaccagtaaaacaactgtagcgtcacttatcaacacacttaacgatctaaatgaaactcttgttacaatgccacttggctatgtaacacatggcttaaatttggaagaagctgctcggtatatgagatctctcaaagtgccagctacagtttctgtttcttcacctgatgctgttacagcgtataatggttatcttacttcttcttctaaaacacctgaagaacattttattgaaaccatctcacttgctggttcctataaagattggtcctattctggacaatctacacaactaggtatagaatttcttaagagaggtgataaaagtgtatattacacgtccaatcctaccacattccacctagatggtgaagttatcacctttgacaatcttaagacacttctttctttgagagaagtgaggactattaaggtgtttacaacagtagacaacattaacctccacacgcaagttgtggacatgtcaatgacatatggacaacagtttggtccaacttatttggatggagctgatgttactaagataaaacctcataactcacatgaaggtaaaacattttacgttttgcctaatgatgacactctacgtgttgaggcttttgagtactaccacacaactgatcctagttttctgggtaggtacatgtcagcattaaatcacactaaaaagtggaaatacccacaagttaatggtttaacttcgattaaatgggcagataacaactgttatcttgccactgcattgttaacactccaacaaatagagttgaagtttaatccacctgctctacaagatgcttattacagagcaagggctggtgaagctgctaacttttgtgcacttatcttagcctactgtaataagacagtaggtgagttaggtgatgttagagaaacaatgagttacttgtttcaacatgccaatttagattcttgcaaaagagtcttgaacgtggtgtgtaaaacttgtggacaacagcagacaacccttaagggtgtagaagctgttatgtacatgggcacactttcttatgaacaattcaagaaaggtgttcagataccttgtacgtgtggtaaacaagctacaaaatatctagtacaacaggagtcaccttttgttatgatgtcagcaccacctgctcagtatgaacttaagcatggtacatttacttgtgctagtgagtacactggtaattaccagtgtggtcactataagcatataacttctaaggaaactttgtattgcatagacggtgctttacttacaaagtcctcagaatacaaaggtcctattacggatgttttctacaaagaaaacagttacacaacaaccataaaaccagttacttataagttggatggtgttgtttgtacagaaattgaccctaagttggacaattattataagaaggacaactcttatttcacagagcaaccaattgatcttgtaccaaaccaaccatatccaaacgcaagcttcgataattttaagttcgtatgcgataatatcaaatttgctgatgatctcaaccagttaactggttataagaaacctgcttcaagagagcttaaagttacatttttccctgacttaaatggtgatgtggtggctattgattataaacactacacaccctcttttaagaaaggagctaaattgttacataagcctattgtttggcatgttaacaatgcaactaataaagccacgtataaaccaaatacctggtgtatacgttgtctttggagcacaaaaccagttgaaacatcaaattcgtttgatgtactgaagtcagaggacgcgcagggaatggataatcttgcatgtgaagatctaaaaccagtctctgaagaagtagtggaaaatcctaccatacagaaagacgttcttgagtgtaatgtgaaaactaccgaagttgtaggagacattatacttaaaccagcaaataatagtttgaagatcacagaagaggttggccacacagatctaatggctgcttatgtagacaattctagtcttactattaagaaacctaatgaactctctagagtattaggtttgaaaacccttgctactcatggtttagctgctgttaatagtgtcccttgggatactatagctaattatgctaagccttttcttaacaaagttgttagtacaactactaacatagttacacggtgtcttaatcgtgtttgtactaattatatgccttacttctttactttattgctacaattgtgtacttttactagaagtacaaattctagaatcaaggcatctatgccgactactatagcaaagaatactgttaagagtgtcggtaaattttgtctagaggcttcatttaattatctcaagtcacctaacttttctaagctgataaacattatcatctggtttttgctattaagtgtttgcctaggttctttaatctactcaaccgctgctttaggtgttttaatgtctaatttaggcatgccttcttactgtactggttacagagaaggctatttgaactctactaatgtcactattgcaacctactgtactggatctataccttgtagtgtttgtcttagtggtttagattctttagacacctatccttctcttgaaactatacagattaccatttcatctttcaaatgggatttaactgcttttggcttagttgcagagtggtttttggcatatattcttttcactaggtttttctatgtacttggattggctgcaatcatgcaattgtttttcagctattttgcagtccattttattagtaactcttggcttatgtggcttataattaatcttgtgcagatggccccgatttcagctatggttagaatgtacatcttctttgcctcattttattatgtgtggaaaagttatgtgcatgttgtagacggttgtaattcatcaacttgtatgatgtgttacaaacgtaatagagcaacaagagtcgaatgtacaactattgttaatggtgttagaaggtccttttatgtctatgctaatggaggtaaaggcttttgcaaactacacaattggaattgtgttaattgtgatacattctgtgctggtagtacatttattagtgatgaagttgcgagagacttgtcactacagtttaaaagaccaataaatcctactgaccaatcttcttacatcgttgatagtgttacagtgaagaatggttccatccatctttactttgataaagctggtcaaaagacttatgaaagacattctctctctcattttgttaacttagacaacctgagagctaataacactaaaggttcattgcctattaatgttatcgttttcgacggtaaatcaaaatgtgaagaatcatctgcaaaatcagcgtctgtttactacagtcagcttatgtgtcaacctatactgttactagatcaggcattagtgtctgatgttggtgatagtgcggaagttgcagttaaaatgtttgatgcttacgttaatacgttttcatcaacttttaacgtaccaatggaaaaactcaaaacactagttgcaactgcagaagctgaacttgcaaagaatgtgtccttagacaatgtcttatctacgtttatttcagcagctcggcaagggtttgttgattcagatgtagaaactaaagatgttgttgaatgtcttaaattgtcacatcaatctgacatagaagttactggcgatagttgtaataactatatgctcacctataacaaagttgaaaacatgacaccccgtgaccttggtgcttgtattgactgtagtgctagacatattaatgcgcaggtagcaaaaagtcacaacattgctttgatatggaacgttaaagatttcatgtcattgtctgaacaactacgaaaacaaatacgtagtgctgctaaaaagaataacttacccttcaagttgacatgtgcaactactagacaagttgttaatgttgtaacaacaaagatagcacttaagggtggtaaaattgtgaataactggttgaagcagcttattaaagttacacttgtgttcctttttgttgctgctattttctatctgataacacctgttcatgtcatgtctaaacatactgacttttcaagtgaaatcataggatacaaggctattgatggtggtgtcactcgtgacatagcatctacagatacttgttttgctaacaaacatgctgattttgacacatggtttagccagcgtggtggtagttatactaatgacaaagcttgcccattgattgctgcagtcataacaagagaagtgggttttgtcgttcctggtttgcctggaacgatattacgcacaactaatggtgactttttgcatttcttacctagagtttttagtgcagttggtaacatctgttacacaccatcaaaacttatagagtacactgactttgcaacatcagcttgtgttttggctgctgaatgtacaatttttaaagacgcttctggtaagccagtaccatattgttatgataccaatgtactagaaggttctgttgcttatgaaagtttacgccctgacacacgttatgtgctcatggatggctctattattcaatttcctaacacctaccttgaaggttctgtaagagtggtaacaacttttgattctgagtactgtaggcacggcacttgtgaaagatcagaagctggtgtttgtgtatctactagtggtagatgggtacttaacaacgattattacagatctttaccaggagttttctgtggtgtagatgctgtaaatttgcttactaacatgtttacaccactaattcaacctattggtgctttggacatatcagcatctatagtagctggtggtattgtagctatcgtagtaacatgccttgcctactattttatgaggtttagacgtgcttttggtgaatacagtcatgtagttgcctttaatactctcctattccttatgtcattcactgtactctgtttaacaccagtttactcattcttacctggtgtttattctgttatttacctgtacttgacattttatctgactaatgatgtttcttttctcgcacatattcagtggatggttatgttcacacctttagtacctttctggataacaattgcttacatcatttgtatttccacaaagcatttctattggttctttagtaattacctaaagagacgtgtagtctttaatggtgtttcctttagtacttttgaagaagctgcgctgtgcacctttttgttaaataaggagatgtatctaaagttgcgtagtgatgtgctattacctcttacgcaatataatagatacttagctctttataacaagtacaagtatttcagtggagcaatggatacaactagctacagagaagctgcttgttgtcatctcgcaaaggctctcaatgacttcagtaactcaggttctgatgttctttaccaaccaccacaaacctctatcacctcagctgttttgcagagtggttttagaaaaatggcattcccatctggtaaagttgagggttgtatggtacaagtaacttgtggtacaactacacttaacggtctttggcttgatgacgtagtttactgtccaagacatgtgatctgcacctctgaagatatgcttaaccctaattatgaagatctactcatccgtaagtctaatcataacttcttggtacaggctggtaatgttcaactcagggttattggacattctatgcaaaattgtgtacttaagcttaaggttgatacagccaatcctaagacacctaagtataagtttgttcgcattcaaccaggacagactttttcagtgttagcttgttacaatggttcaccatctggtgtttaccaatgtgctatgaggcccaatttcactattaagggttcattccttaatggttcatgtggtagtgttggttttaacatagattatgactgtgtctctttttgttacatgcaccatatggaattaccaactggagttcatgctggcacagacttagaaggtaacttttatggaccttttgttgacaggcaaacagcacaagcagctggtacagatacaactattacagttaatgttcttgcttggttgtacgctgctgttataaatggagacaggtggtttctcaatcgatttaccacaactcttaatgactttaaccttgtggctatgaagtacaattatgaacctctaacacaagaccatgttgacatactaggacctctttctgctcaaactggaattgccgttttagatatgtgtgcttcattaaaagaacttctgcaaaatggtatgaatggacgtaccatattgggtagtgctttattagaagatgagtttacaccttttgatgttgttagacaatgctcaggtgttactttccaaagtgcagtgaaaagaacaatcaagggtacacaccactggttgttactcacaattttgacttcacttttagttttagtccagagtactcaatggtctttgttctttttcttctacgaaaatgcctttttaccttttgctatgggtattattgctatgtctgcttttgcaatgatgtttgtcaaacataagcatgcatttctctgtttgtttttgttaccttctcttgccactgtagcttactttaatatggtctacatgcctgctagttgggtgatgcgtattatgacatggttggatatggttgatactagtttgtctggttttaagctaaaagactgtgttatgtatgcatcagctgtagtgttactaatccttatgacagcaagaactgtgtatgatgatggtgctaggagagtgtggacacttatgaatgtcttgacactcgtttataaagtttactatggcaacgctttagatcaagccatttccatgtgggctcttataatctctgttacttctaactactcaggtgtagttacaactgtcatgtttttggccagaggtattgtttttatgtgtgttgagtattgccctattttcttcataactggtaatacacttcagtgtataatgctagtctattgtttcttaggctatttttgtacttgttacttcggcctcttttgtttactcaaccgctactttagactgactcttggtgtttatgattacttagtgtctacacaggagtttagatatatgaattcacagggactactcccacccaagaatagcatagatgccttcaaactcaacattaaattgttgggtgttggtggcaaaccttgtatcaaagtagccactgtacagtctaaaatgtcagatgtaaagtgcacatcagtagtcttactctcagttttgcaacaactcagagtagaatcatcatctaaattgtgggctcaatgtgtccagttacacaatgacattctcttagctaaagatactactgaagcctttgaaaaaatggtttcactactttctgttttgctttccatgcagggtgctgtagacataaacaagctttgtgaagaaatgctggacaacagggcaaccttacaagctatagcctcagagtttagttcccttccatcatatgcagcttttgctactgctcaagaagcttatgagcaggctgttgctaatggtgattctgaagttgttcttaaaaagttgaagaagtctttgaatgtggctaaatctgaatttgaccgtgatgcagccatgcaacgtaagttggaaaagatggctgatcaagctatgacccaaatgtataaacaggctagatctgaggacaagagggcaaaagttactagtgctatgcagacaatgcttttcactatgcttagaaagttggataatgatgcactcaacaacattatcaacaatgcaagagatggttgtgttcccttgaacataatacctcttacaacagcagccaaactaatggttgtcataccagactacaacacatataagaatacgtgtgatggtacaacatttacttatgcatcagcattgtgggaaatccaacaggttgtagatgcagatagtaaaattgttcagcttagtgaaattagtatggacaattcacctaatttagcatggcctcttattgtaacagctttaagggccaattctgctgtcaaattacagaataatgagcttagtcctgttgcactaagacaaatgtcttgtgctgccggtactacacaaactgcttgcactgatgacaatgcgttagcttactacaacacaacaaagggaggtaggtttgtacttgcactgttatccgatttacaggatttgaaatgggctagattccctaagagtgatggaactggtactatctatacagaactggaaccaccttgtaggtttgttacagacacacctaaaggtcctaaagtgaagtatctttacttcatcaaaggattaaacaacctaaatagaggtatggtacttggtagtttagctgccacagtacgtttacaagctggtaatgcaacagaagttcctgctaattcaactgtactttctttctgtgcttttgctgtagatgctgctaaagcttacaaagattatctagctagtgggggacaaccaatcactaattgtgttaagatgttgtgtacacacactggtactggtcaggcaataacagttacaccggaagccaatatggatcaagaatcctttggtggtgcatcgtgttgtctgtactgccgttgtcatatagatcatccaaatcctaaaggattttgtgacttaaaaggtaagtatgtacaaatacctacaacttgtgctaatgaccctgtgggttttacacttaaaaacacagtctgtaccgtctgcggtatgtggaaaggttatggttgtagttgtgatcaactccgcgaacccatgcttcagtcagctgatgcacaatcgtttttaaacgggtttgcggtgtaagtgcagcccgtcttacaccgtgcggcacaggcactagtactgatgtcgtatatagagcttttgacatctacaatgataaagtagctggttttgctaagttcctaaaaactaattgttgtcgcttccaagaaaaggacgaagatgacaatctcattgattcttactttgtagttaagagacacactttctctaactaccaacatgaagaaacaatttacaacctgcttaaggattgtccagctgttgctaaacatgacttctttaagtttagaatagacggtgacatggtaccacatatatcacgtcaacgtcttactaaatacacaatggcagacctcgtctatgctttaaggcattttgatgaaggtaattgtgacacattaaaagaaatacttgtcacatacaattgttgtgatgatgactacttcaataaaaaggactggtatgattttgtagaaaacccagatatattacgcgtatacgccaacttaggtgaacgtgtacgccaagctttgttaaaaacagtacagttctgtgatgccatgcgaaatgctggtattgttggtgtactgacattagataatcaagatctcaatggtaactggtatgactttggtgatttcatacaaaccacgccaggtagtggagttcctgttgtagactcttattattcattgctcatgcctatattaaccttgaccagggctttaactgcagagtcacatgttgacactgacttaacaaagccttacattaagtgggatttgttaaaatacgacttcacggaagagaggttaaaactctttgaccgttattttaaatactgggatcagacataccacccaaattgtgttaactgtttggatgacagatgcattctgcattgtgcaaactttaatgttctgttctctacagtgttcccacctacaagttttggaccactagtgagaaaaatatttgttgatggtgttccatttgtagtttcaactggataccacttcagagagctaggtgttgtacataatcaggatgtaaacttacatagctctagacttagttttaaggaattacttgtgtatgctgctgatcctgctatgcatgctgcttctggtaatctattactagataaacgcactacgtgcttttcagtagctgcacttactaacaatgttgcttttcaaactgtcaaacccggtaattttaacaaggacttctatgactttgctgtgtctaagggtttctttaaggaaggaagttctgttgaattaaaacacttcttctttgctcaggatggtaatgctgctatcagcgattatgactactatcgttataatctaccaacaatgtgtgatatcagacaactactatttgtagttgaagttgttgataagtactttgattgttacgatggtggctgtattaatgctaaccaagtcatcgtcaacaacctagacaaatcagctggttttccatttaataaatggggtaaggctagactttattatgattccatgagttatgaggatcaagatgcacttttcgcatatacaaaacgtaatgtcatccctactataactcaaatgaaccttaagtatgccattagtgcaaagaatagagctcgcaccgtagctggtgtctctatctgtagtactatgaccaatagacagtttcatcaaaaattactcaagtcaatagccgccactagaggagctactgtagtaattggaacaagcaaattctatggtggttggcacaacatgctcaaaactgtttatagtgatgtagaaaaccctcaccttatgggttgggattatcctaaatgtgatagagccatgcctaacatgcttagaattatggcctcacttgttcttgctcgcaaacatacaacgtgttgtagcttgtcacaccgtttctatagattagctaatgagtgtgctcaagtattgagtgaaatggtcatgtgtggcggttcactatatgttaaaccaggtggaacctcatcaggagatgccacaactgcttatgctaatagtgtgtttaacatttgtcaagctgtcacggccaatgttaatgcacttttatctactgatggtaacaaaattgccgataagtatgtccgcaatttacaacacagactttatgagtgtctctatagaaatagagatgttgacacagactttgtgaatgagttttacgcatatttgcgtaaacatttctcaatgatgatactctctgacgatgctgttgtgtgtttcaatagcacttatgcatctcaaggtctagtggctagcataaagaactttaagtcagttctttactatcaaaacaacgtttttatgtctgaagcaaaatgttggactgagactgaccttactaaaggacctcatgaattttgctctcaacatacaatgctagttaaacagggtgatgattatgtgtaccttccttacccagatccatcaagaatcctaggtgccggttgttttgtagatgatatcgtaaaaacagatggtacacttatgattgaacggttcgtgtctttagctatagatgcttacccacttactaaacatcctaatcaggagtatgctgatgtctttcatttgtacttacaatacatacgtaagctacatgatgagttaacaggacacatgttagacatgtattctgttatgcttactaatgataacacttcaaggtattgggaacctgagttttatgaggctatgtacacaccgcatacagtcttacaagctgttggtgcttgtgttctttgcaattcacagacttcattaagatgtggtgcttgcatacgtagaccattcttatgttgtaaatgctgttacgaccatgtcatctcaacatcacataaattagtcttgtctgttaatccgtatgtttgcaatgctccaggttgtgatgtcacagatgtgactcaactttacttaggaggtatgagctattactgtaagtcacataaaccacccattagttttccattgtgtgctaatggacaagtttttggtctctacaagaatacatgtgttggtagcgataatgttactgactttaatgcaattgcaacatgtgactggacaaatgctggtgattacattttagctaacacctgtactgaaagactcaagctttttgcagcagaaacgctcaaagctactgaggagacatttaaactgtcttatggtattgctactgtacgtgaagtgctgtctgacagagaattacatctttcatgggaagttggtaaacctagaccaccacttaaccgaaattatgtctttactggttatcgtgtaactaaaaacagtaaagtgcaaatcggagagtacacctttgaaaaaggtgactatggtgatgctgttgtttaccgaggtacaacaacttacaaactcaacgttggtgattattttgtgctgacatcacatacagtaatgccattaagtgcacctacactagtgccacaagagcactatgttagaattactggcttatacccaacactcaatatctcagatgagttttctagcaatgttgcaaattatcaaaaggttggtatgcaaaagtattctacactccagggaccacctggtactggtaaaagtcattttgctattggtctagctctctactacccttctgctcgcatagtatatacagcttgctctcatgcagctgttgatgcactatgtgagaaggcattaaaatatttgcccatagacaaatgtagtagaattatacctgcacgtgctcgtgtagagtgttttgataaattcaaggtgaattcaacattagaacagtatgtcttttgtactgtaaatgcattgcctgagacgacagcagatatagttgtctttgatgaaatttcaatggccacaaattatgatttgagtgttgtcaatgccagattacgtgctaagcactatgtgtacattggtgatcctgctcaattacctgcaccacgcacattactaactaagggtacactagaaccagaatatttcaattcagtgtgtagacttatgaaaactataggtccagacatgttcctcggaacttgtcgtagatgtcctgctgaaattgttgacactgtgagtgctttggtttatgataataagcttaaggcacataaagacaaatcagctcaatgctttaaaatgttctacaagggtgttatcacgcatgatgtttcatctgcaattaacaggccacaaataggcgtggtaagagaattccttacacgtaaccctgcttggagaaaagctgtctttatttcaccttacaattcccagaatgctgtagcctcaaagattttgggactaccaactcaaactgttgattcatcacagggctcagaatatgactatgtcatattcactcaaaccactgaaacagctcactcttgtaatgtaaacagattcaacgttgctattaccagagcaaaagtaggcatactttgcataatgtctgatagagacctttatgacaagttgcaatttacaagtcttgaaattccacgtaggaatgtggcaactttacaagctgaaaatgtaacaggactctttaaagattgtagtaaggtaatcactgggttacatcctacacaggcacctacacacttaagtgttgatactaaattcaaaactgaaggtttatgtgttgacatacctggcatacctaaggacatgacctatagaagattaatctctatgatgggtttcaaaatgaattaccaggttaatggttaccctaacatgtttatcacccgcgaagaagctataagacatgtacgtgcatggattggcttcgatgtcgaaggttgtcatgctactagagaagctgttggtaccaatttacctttacagctaggtttttctacaggtgttaacctagttgctgtacctacaggttatgttgatacacctaataatacagatttttccagagttagtgctaaaccaccgcctggagatcaatttaaacacctcataccacttatgtacaaaggacttccttggaatgtagtgcgtataaagattgtccaaatgttaagtgacacacttaaaaatctctctgacagagtcgtatttgtcttatgggcacatggctttgagttgacatctatgaagtattttgtgaagatcggacctgagcgcacatgttgtctatgtgatagacgtgctacatgcttttccactgcttcagacacttatgcctgttggcatcattctattggatttgattacgtctataatccgtttatgattgatgttcaacaatggggttttacaggtaacctacaaagcaaccatgatctgtattgtcaagtccatggtaatgcacatgtagctagttgtgatgcaatcatgactaggtgtctagctgtccacgagtgctttgttaagcgtgttgactggactattgaatatcctataatcggtgatgaactgaagattaatgcggcttgtagaaaggttcaacacatggttgttaaagctgcattattagcagacaaattcccagttcttcacgacattggtaaccctaaagctattaagtgtgtacctcaagctgatgtagaatggaagttctatgatgcacagccttgtagtgacaaagcttacaaaatagaagaactgttctattcttatgccacacattctgacaaattcacagatggtgtatgcctattttggaattgcaatgtcgatagatatcctgctaattccattgtttgtagatttgacactagagtgctatctaaccttaacttgcctggttgtgatggtggcagtttgtatgtaaataagcatgcattccacacaccagcttttgataaaagtgcttttgttaatctaaagcaacttccatttttctattactctgacagtccatgtgagtctcatggaaaacaagtagtgtcagatatagattatgtaccactaaagtctgctacgtgtataacacgttgcaatttaggtggtgctgtctgtagacatcatgctaatgagtacagattgtatctcgatgcttataacatgatgatctcagctggctttagcttgtgggtttacaaacaatttgatacctataacctctggaacacttttacaagacttcagagtttagaaaatgtggcttttaatgttgtaaataagggacactttgatggacaacagggtgaagtaccagtttctatcattaacaacactgtttacacaaaagttgatggtgttgatgtagaattgtttgagaacaaaaccacattacctgttaatgtagcatttgagctttgggctaagcgcaacattaaaccagtaccagaggtgaaaatactcaataatttgggtgtggacattgctgctaatactgtgatctgggactacaaaagagatgctccagcacatatatctactattggtgtttgttctatgactgacatagccaagaaaccaactgaaacgatttgtgcaccactcactgtcttttttgatggtagagttgatggtcaagtagacttatttagaaatgcccgtaatggtgttcttattacagaaggtagtgttaaaggtttacaaccatctgtaggtcccaaacaagctagtcttaatggagtcacattaattggagaagccgtaaaaacacagttcaattattacaagaaagtggatggtgttgtccaacaattacctgaaacttactttactcagagtagaaacttacaggaatttaagcccaggagtcaaatggaaattgatttcttagaacttgctatggatgaattcattgaacggtataaattagaaggctatgccttcgaacatatcgtttatggagattttagtcatagtcagttaggtggtttacatctactgattggactagctaaacgttttaaggaatcaccttttgaacttgaagattttattcctatggacagtacagttaaaaactacttcataacagatgcgcaaacaggttcatctaagtgtgtgtgttctgttattgatcttttacttgatgacttcgttgaaataataaagtcccaagatttatctgtagtttctaaggttgtcaaagtgactattgactatacagaaatctcatttatgctttggtgtaaagatggccatgtagaaacattttacccaaaattacaatctagtcaagcgtggcaaccgggtgttgctatgcctaatctttacaaaatgcaaagaatgctattagaaaagtgtgaccttcaaaattatggtgatagtgcaacattacctaaaggcataatgatgaatgtcgcaaaatatactcaactgtgtcaatatttaaacacactgacattagctgtaccctataatatgagagttatccattttggtgctggttctgataaaggagttgcaccaggtacagctgttttaagacaatggttgcctacaggtacgctgcttgtcgattcagatcttaatgactttgtctctgatgcagattcaactttgattggtgattgtgcaactgtacatacagctaataaatgggatctcattattagtgatatgtacgaccctaagactaagaatgtcacaaaagaaaacgactctaaagagggttttttcacttacatttgtgggtttatacaacaaaagctagctcttggaggttccgtggctataaagataacagaacattcttggaatgctgatctttataagctcatgggacacttcgcatggtggacagcctttgttactaatgtgaatgcgtcatcatctgaagcatttttaatcggatgtaactaccttggcaaaccacgcgaacaaatagatggttatgtcatgcatgcaaattacatattttggaggaatacaaatccaattcagctttcttcttattctttattcgacatgagtaaattcccccttaaattaaggggtactgctgttatgtctttaaaagaaggtcaaatcaatgatatgattctctctcttcttagtaaaggtagacttataattagagaaaacaacagagttgttatttctagtgatgttcttgttaacaactaaacgaacaatgtttgtttttcttgttttattgccactagtctctagtcagtgtgttaatcttacaaccagaactcaattaccccctgcatacactaattctttcacacgtggtgtttattaccctgacaaagttttcagatcctcagttttacattcaactcaggacttgttcttacctttcttttccaatgttacttggttccatgctatacatgtctctgggaccaatggtactaagaggtttgataaccctgtcctaccatttaatgatggtgtttactttgcttccactgagaagtctaacataataagaggctggatttttggtactactttagattcgaaaacccagtccctacttattgttaataacgctactaatgttgttatcaaagtctgtgaatttcaattttgtaacgatccatttttgggtgtttattaccacaaaaacaacaaaagttggatggaaagtgagttcagagtttattctagtgcgaataattgcacttttgaatacgtctctcagccttttcttatggaccttgaaggaaaacagggtaatttcaaaaatcttagggaatttgtgttcaagaatattgatggttacttcaagatatactctaagcacacgcctattaatttagtgcgtgatctccctcagggtttttcggctttagaaccattggtagatttgccaataggtattaacatcactaggtttcaaactttacttgctttacatagaagttatttaactcctggtgattcttcttcaggttggacagctggtgctgcagcttattatgtgggttatcttcaacctaggacttttctactgaagtacaatgaaaatggaaccattacagatgctgtagactgtgcacttgaccctctctcagaaacaaagtgtacgttgaaatccttcactgtagaaaaaggaatctatcaaacttctaactttagagtccaaccaacagaatctattgttagatttcctaacatcacaaacttgtgcccttttggtgaagtttttaacgccaccagatttgcatctgtttatgcttggaacaggaagagaatcagcaactgtgttgctgattattctgtcctgtataattccgcatcattttccacttttaagtgttatggagtgtctcctactaaattaaatgatctctgctttactaatgtctatgcagattcatttgtaattagaggtgatgaagtcagacaaatcgctccagggcaaactggaaagattgctgattataactacaaattaccagatgattttacaggctgcgttatagcttggaattctaacaatcttgattctaaggttggtggtaattataattacctgtacagattgtttaggaagtctaatctcaaaccttttgagagagatatttcaactgaaatctatcaggccggtagcacaccttgtaatggtgttgaaggttttaattgttactttcctctgcaatcatatggtttccaacccactaatggtgttggttaccaaccatacagagtagtagtactttcttttgaacttctacatgcaccagcaactgtttgtggacctaaaaagtctactaatttggttaagaacaagtgtgtcaatttcaacttcaatggtttaacaggcacaggtgttcttactgagtctaacaaaaagtttctgcctttccaacaatttggcagagacattgctgacactactgatgctgttcgtgatccacaaacacttgagattcttgacattacaccatgttcttttggtggtgtcagtgttataacaccaggaacaaatacttctaaccaggttgctgttctttatcaggatgttaactgcacagaagtccctgttgctattcatgcagatcaacttactcctacttggcgtgtttattctacaggttctaatgtttttcaaacacgtgcaggctgtttaataggggctgaacatgtcaacaactcatatgagtgtgacatacccattggtgcaggtatatgcgctagttatcagactcagactaattctcctcggagagcaagaagtgtagctagtcaatccatcattgcctacactatgtcacttggtgcagaaaattcagttgcttactctaataactctattgccatacccacaaattttactattagcgttaccacagaaattctaccagtgtctatgaccaagacatcagtagattgtacaatgtacatttgtggtgattcaactgaatgcagcaatcttttgttgcaatatggcagtttttgtacacaattaaaccgtgctttaactggaatagctgttgaacaagacaaaaacacccaagaagtttttgcacaagtcaaacaaatttacaagacaccaccaattaaagattttggcggttttaattttagccagatactgccagatccatcaaaaccaagcaagaggtcatttattgaagatctactgttcaacaaagtgacacttgcagatgctggcttcatcaaacaatatggtgattgccttggtgatattgctgctagagacctcatttgtgcacaaaagtttaacggccttactgttttgccacctttgctcacagatgaaatgattgctcaatacacttctgcactgttagcaggtacaatcacttctggttggacttttggtgcaggtgctgcattacaaataccatttgctatgcaaatggcttataggtttaatggtattggagttacacagaatgttctctatgagaaccaaaaattgattgccaaccaatttaatagtgctattggcaaaattcaagactcactttcttccacagcaagtgcacttggaaaacttcaagatgtggtcaaccaaaatgcacaagctttaaacacgcttgttaaacaacttagctccaattttggtgcaatttcaagtgttttaaacgacatcctttcacgtcttgacaaagttgaggctgaagtgcaaattgataggttgatcacaggcagacttcaaagtttgcagacatatgtgactcaacaattaattagagctgcagaaatcagagcttctgctaatcttgctgctactaaaatgtcagagtgtgtacttggacaatcaaaaagagttgacttttgcggaaagggctatcatcttatgtcatttcctcagtcagcacctcatggtgtcgtctttttgcatgtgacttatgtccctgcacaagaaaagaacttcacaactgctcctgccatttgtcatgatggaaaagcacactttcctcgtgaaggtgtctttgtttcaaatggcacacactggtttgtaacacaaaggaatttttatgaaccacaaatcattactacagacaacacatttgtgtctggtaactgtgatgttgtaataggaattgtcaacaacacagtttatgatcctttgcaacctgaattagactcattcaaggaggagcttgataaatacttcaagaaccatacctcaccagatgttgatttaggtgacatctctggcattaatgcttcagttgtaaacattcagaaagaaatcgaccgcctcaatgaggttgccaagaatttaaatgaatctctcatcgatctccaagaacttggaaagtatgagcagtatataaaatggccatggtacatttggctaggttttatagctggcttgattgccatagtaatggtgacaattatgctttgctgtatgaccagttgctgtagttgtctcaagggctgttgttcttgtggatcctgctgcaaatttgacgaggacgactctgagccagtgctcaaaggagtcaaattacattacacataaacgaacttatggatttgtttatgagaatcttcacaattggaactgtaactttgaagcaaggtgaaatcaaggatgctactccttcagattttgttagagctactgcaacgataccgatacaagcatcacttcctttcggatggcttattgttggcgttgcacttcttgctgtttttcagagcgcttccaaaatcataaccctcaaaaagagatggcaactagcactctccaagggtgttcactttgtttgcaacttgctgttgttgtttgtaacagtttactcacatcttttgcttgttgctgctggccttgaagccccttttctctatctttatgctttagtctacttcttgcagagtataaactttgtacgcataataatgaggctttggctttgctggaaatgccgttccaaaaacccattactttatgatgccaactattttctttgctggcatactaattgttacgactattgtataccttacaatagtgtaacttcttcaattgtcattacttcaggtgatggcacaacaagtcctatttctgaacatgactaccagattggtggttatactgaaaaatgggaatctggagtaaaagactgtgttgtattacacagttacttcacttcagactattaccagctgtactcaactcaattgagtacagacactggtgttgaacatgttaccttcttcatctacaataaaatcgttgatgagcctgaagaacatgtccaaattcacacaatcgacgtttcatccggagttgttaatccagtaatggaaccaatttatgatgaaccgacgacgactactagcgtgcctttgtaagcacaagctgatgagtacgaacttatgtactcattcgtttcggaagagacaggtacgttaatagttaatagcgtacttctttttcttgctttcgtggtattcttgctagttacactagccattcttactgcgcttcgattgtgtgcgtactgttgcaatattgttaacgtgagtcttgtaaaaccttctttttacgtttactctcgtgttaaaaatctgaattcttctcgggttcctgatcttctggtctaaacgaactaaatattatattagtttttctgtttggaactttaattttagccatggcagattccaacggtactattaccgttgaggagctgaaaaagctccttgaacaatggaacctagtaataggtttcctattccttacatggatttgcctgctgcaatttgcctatgccaacaggaataggtttttgtacatcattaagttgattttcctctggctgttatggccagtaactttagcttgttttgtgcttgctgctgtttacagaataaattggatcaccggtggaattgctattgcaatggcttgtcttgtaggattgatgtggctaagctacttcattgcttctttcagactgtttgcgcgtacgcgttccatgtggtcattcaatccagaaactaacattcttctcaacgtgccactccatggaactattctgactagaccgcttctagaaagtgaactcgtaatcggagctgttatccttcgtggacatcttcgtattgctggacatcatctaggacgctgtgacatcaaggatctacctaaagaaatcactgttgctacatcacgaacgctttcttattacaaattgggagcttcacagcgtgtagcaggtgattcaggttttgctgcatatagtcgctacaggattggcaactataaattaaacacagaccattccagtagcagtgacaatattgctttgcttgtacagtaagtgacaacagatgtttcatctcgttgactttcaggttactatagcagagatattactaatcatcatgaggacttttaaagtttccatttggaatcttgattacatcataaacctcataattaagaacttaagcaagtcactaactgagaataaatattctcaactagacgaggagcagccaatggagattgattaaacgaacatgaaaattattcttttcttggcactgataacactcgctacttgtgagctttatcactaccaagagtgtgttagaggtacaacagtacttttaaaagaaccttgctcgtcgggaacatacgagggcaattcaccatttcatcctctagctgataacaaatttgcactgacttgctttagcactcaatttgcttttgcttgtcctgacggcgtaaaacacgtctatcagttacgtgccagatcagtttcacctaaactgttcatcagacaagaggaagttcaagaactttactctccaatttttcttattgttgcggcaatagtgtttataacactttgcttcacactcaaaagaaagacagaatgattgaactttcattaattgacttctatttgtgctttttagcctttctgctattccttgttttaattatgcttattatcttttggttctcacttgaactgcaagatcataatgaaacttgtcacgcctaaacgaacatgaaatttcttgttttcttaggaatcatcacaactgtagctgcatttcaccaagaatgtagtttacagtcatgtactcaacatcaaccatatgtagttgatgacccgtgtcctattcacttctattctaaatggtatatcagagtaggagctagaaaatcagcacctttaattgaattgtgcgtggatgaggctggttctaaatcacccattcagtacatcgatatcggtaattatacagtttcctgtttaccttttacaattaactgccaggaacctaaattgggtagtcttgtagtgcgttgttcgttctacgaggactttttagagtatcatgacgttcgtgttgttttagatttcatctaaacgaacaaactaaaatgtctgataatggacctcaaaatcagcgaaatgcacctcgcattacgtttggtggaccatcagattcaactggcagtaaccagaatggagaacgaagtggtgcgcgatcaaaacaacgccgcccgcaaggtttacccaataatactgcgtcttggttcaccgctctcactcaacatggcaaggaagatttaaaattccctcgaggacaaggcgttccaattaacaccaatagcagtccagatgaccaaattggctactaccgccgcgccacaagacgaattcgtggtggtgatggtaaaatgaaagatctcagtccaagatggtatttctactatctaggaactgggccagaagctggacttccttatggtgctaacaaagatggcatcatatgggttgcaactgagggagccttgaatacaccaaaagatcacattggcaccagaaatcctgctaacaatgctgcaatcgtgctacaacttcctcaaggaacaacattaccaaaaggtttttacgcagaagggtctagaggtggaagtcaagcctcttctagatcatcatcacgtagtcgcaacagttcaagaaattcaactccaggttcaagtagaggaacttctcctgctagaatggctggaaatggaggtgatgctgctcttgctttgttactacttgacagattgaaccagcttgagagcaaaatgtctggtaaaggccaacaacaacaaggccaaactgtcactaagaaatctgctgctgaggcttctaagaagcctagacaaaaacgtactgccactaaagcatacaatgtaacacaagctttcggcagacgtggtccagaacaaactcaaggaaattttggggatcaggaactaatcagacaaggaactgattacaaacattggccgcaaattgcacaatttgctccttctgcttcagcgttctttggaatgtcgagaattggaatggaagtcacaccttcgggaacatggttgacctatacaggtgccatcaaattggatgacaaagatccaaatttcaaagatcaagtcattttgctgaataagcatattgacgcatacaaaacattcccaccaacagagcctaaaaaggacaaaaagaagaaggctgatgaaactcaagccttaccgcagagacagaagaaacagcaaactgtgactcttcttcctgctgcagatttggatgatttctccaaacaattgcaacaatccatgagcagtgctgactcaactcaggcctaaactcatgcagaccacacaaggcagatgggctatataaacgttttcgcttttccgtttacgatatatagtctactcttgtgcagaatgaattctcgtaactacatagcacaagtagatgtagttaactttaatctcacatagcaatctttaatcagtgtgtaacattagggaggacttgaaagagccaccacattttcaccgaggccacgcggagtacgatcgagtgtacagtgaacaatgctagggagagctgcctatatggaagagccctaatgtgtaaaattaattttagtagtgctatccccatgtgattttaatagcttcttaggagaatgacaaaaaaaaacaaaaaaaa

SEQ ID NO: 45 - DNA, 10827 bp, Artificial Sequence
  vector
cggccgtaagatacattgatgagtttggacaaaccacaactagaatgcagtgaaaaaaatgctttatttgtgaaatttgtgatgctatagctttatttgtaaccattataagctgcaataaacaagttgtttaaaccacgtgatgaccatacacctcgggatactagatgtataatgtccgccatgcagacgaaaccagtcggagattaccgagcattctatcacgtcggcgaccaatagtgagcttagggataacagggtaataaacgatccccgggaattcactggccgtcgttttacaacgtcgtgactgggaaaaccctggcgttacccaacttaatcgccttgcagcacatccccctttcgccagctggcgtaatagcgaagaggcccgcaccgatcgcccttcccaacagttgcgcagcctgaatggcgaatggcgatagatccggtggatgaccttttgaatgacctttaatagattatattactaattaattggggaccctagaggtccccttttttattttaaaaattttttcacaaaacggtttacaagcataaagctcggacggatcttttccgctgcataaccctgcttcggggtcattatagcgattttttcggtatatccatcctttttcgcacgatatacaggattttgccaaagggttcgtgtagactttccttggtgtatccaacggcgtcagccgggcaggataggtgaagtaggcccacccgcgagcgggtgttccttcttcactgtcccttattcgcacctggcggtgctcaacgggaatcctgctctgcgaggctggccggctaccgccggcgtaacagatgagggcaagcggatggctgatgaaaccaagccaaccaggaagggcagcccacctatcaaggtgtcgatgcaggggggggggaaagccacgttgtgtctcaaaatctctgatgttacattgcacaagataaaaatatatcatcatgaacaataaaactgtctgcttacataaacagtaatacaaggggtgttatgagccatattcaacgggaaacgtcttgctcaaggccgcgattaaattccaacatggatgctgatttatatgggtataaatgggctcgcgataatgtcgggcaatcaggtgcgacaatctatcgattgtatgggaagcccgatgcgccagagttgtttctgaaacatggcaaaggtagcgttgccaatgatgttacagatgagatggtcagactaaactggctgacggaatttatgcctcttccgaccatcaagcattttatccgtactcctgatgatgcatggttactcaccactgcgatccccggaaaaacagcattccaggtattagaagaatatcctgattcaggtgaaaatattgttgatgcgctggcagtgttcctgcgccggttgcattcgattcctgtttgtaattgtccttttaacagcgatcgcgtatttcgtctcgctcaggcgcaatcacgaatgaataacggtttggttgatgcgagtgattttgatgacgagcgtaatggctggcctgttgaacaagtctggaaagaaatgcataagtttttgccattctcaccggattcagtcgtcactcatggtgatttctcacttgataaccttatttttgacgaggggaaattaataggttgtattgatgttggacgagtcggaatcgcagaccgataccaggatcttgccatcctatggaactgcctcggtgagttttctccttcattacagaaacggctttttcaaaaatatggtattgataatcctgatatgaataaattgcagtttcatttgatgctcgatgagtttttctaatcagaattggttaattggttgtaacactggcagagcattacgctgacttgacgggacggcggctttgttgaataaatcgaacttttgctgagttgaaggatcagatcacgcatcttcccgacaacgcagaccgttccgtggcaaagcaaaagttcaaaatcaccaactggtccacctacaacaaagctctcatcaaccgtggctccctcactttctggctggatgatggggcgattcaggcctggtatgagtcagcaacaccttcttcacgaggcagacctcagacggtatcggatcgatcccccgatgtgtagcagtggcggaccatataggcagatcagaaggcgcggttctcctacatgagcttttcaattcaattcatcattttttttttattcttttttttgatttcggtttccttgaaatttttttgattcggtaatctccgaacagaaggaagaacgaaggaaggagcacagacttagattggtatatatacgcatatgtagtgttgaagaaacatgaaattgcccagtattcttaacccaactgcacagaacaaaaacctgcaggaaacgaagataaatcatgtcgaaagctacatataaggaacgtgctgctactcatcctagtcctgttgctgccaagctatttaatatcatgcacgaaaagcaaacaaacttgtgtgcttcattggatgttcgtaccaccaaggaattactggagttagttgaagcattaggtcccaaaatttgtttactaaaaacacatgtggatatcttgactgatttttccatggagggcacagttaagccgctaaaggcattatccgccaagtacaattttttactcttcgaagacagaaaatttgctgacattggtaatacagtcaaattgcagtactctgcgggtgtatacagaatagcagaatgggcagacattacgaatgcacacggtgtggtgggcccaggtattgttagcggtttgaagcaggcggcagaagaagtaacaaaggaacctagaggccttttgatgttagcagaattgtcatgcaagggctccctatctactggagaatatactaagggtactgttgacattgcgaagagcgacaaagattttgttatcggctttattgctcaaagagacatgggtggaagagatgaaggttacgattggttgattatgacacccggtgtgggtttagatgacaagggagacgcattgggtcaacagtatagaaccgtggatgatgtggtctctacaggatctgacattattattgttggaagaggactatttgcaaagggaagggatgctaaggtagagggtgaacgttacagaaaagcaggctgggaagcatatttgagaagatgcggccagcaaaactaaaaaactgtattataagtaaatgcatgtatactaaactcacaaattagagcttcaatttaattatatcagttattacccgggaatctcggtcgtaatgatttttataatgacgaaaaaaaaaaaattggaaagaaaaagctgggcgcgccggccggcccttttcatcacgtgctataaaaataattataatttaaattttttaatataaatatataaattaaaaatagaaagtaaaaaaagaaattaaagaaaaaatagtttttgttttccgaagatgtaaaagactctagggggatcgccaacaaatactaccttttatcttgctcttcctgctctcaggtattaatgccgaattgtttcatcttgtctgtgtagaagaccacacacgaaaatcctgtgattttacattttacttatcgttaatcgaatgtatatctatttaatctgcttttcttgtctaataaatatatatgtaaagtacgctttttgttgaaattttttaaacctttgtttatttttttttttcttcattccgtaactcttctaccttctttatttactttctaaaatccaaatacaaaacataaaaataaataaacacagagtaaattcccaaattattccatcattaaaagatacgaggcgcgtgtaagttacaggcaagcgatcggccggcccgggcatttaaatgcaggccgcgtacgcgtcgacggtaccgaattcgcttaaacgagctcatgttcgccggtgaacgcgttgaggaagccgggcagtgcctcggcaaaatccttgcgtgtagacaagacatctgcgtagcagttgtcctcaacaacgatgtcgaaatccaaatcggagtgctcatcgagtcctccgtgaacgtaagagccgccgatcagaagagcgcggaagcgaacatcggaagcgaccgcatcgcggatgcggttcaagaaagttgcatgagcttgtggaagtgtgctgagcataaatgattctcctagctgttctttgggtaagtacgccatcaggacgttgtgagtggcgcgatttttagcggctgaaatcagcccttgagcctgtcggcaagtcgcgtcatgaggtccatgcgctcatgcaggatcgccacgaccaacgcgggttcgcccgcacgcggcaggcaaaaaacgtagtggtgttcgcagcgggccatccgcagcgcgggaaagagttcgctcatgtccttaaacgggccttcgccggcggcaagcctggctatgccctgttccagcttagcgatatagcggcgcacctgcgccgcgccccactcccggcgcgtgtagcggatgatgccgcgtagatcggcttcggcctcagccgtgaggatgtaggccgtcaagcgcgatccccgctgagttcttcatcaagaatttcgccgacgctcttggtggacaccttgccggcaagcccatcgttgatgcggttccccagcatggttttcagttcctgccatgcctgatcggcatcagcgtcaccggggaacagacgttcgagggcgtattgcttaatggtcttgccctgcaaggcggccagggctttcaggctctggtgctgctggtccgtcatgtcgattgtcaggcggctcattggataacctccataaaatacacgtaaccacattagcacatatgtgggcgtgaggctacagcgcgaggcgcattaaggtcgggaaaatgcgctaggcgcatttaaattgcgtattgctgtaatgcgccatgccggctagactaggcccaaatgggtatacccaatttgaccaagggggacgcgatgagggcggccaagcactaccgacaacttctatccatcgacttcaacatcgaggcgctggccttcgtgcctggacccgacggcacacgcggccggcgcatccacgtcctggggcgcgaggtccgcgaccggcccggcctggtcgagtacctttcgccggcgttcggctcgcgggtggcgctggacggctactgcaaggccaatttcgatgcagtgctgcacctggcgtaccccgatcatcagcaatggggccacgcatgaagcgccgaagctacgccatgctgcgcgccgctgccgcgctggccgtcctggtcgttgcctcgccggcatgggccgagctgcgcggcgaggtcgtgcgcatcatcgacggcgacaccatcgacgtgctggtagacaagcagccggtgcgcgtgcgcctggtggacattgacgcgccggaaaagcggcaagccttcggcgaacgtgcgcgccaggcgctggccggcatggtgttccgccggcacgtcctggtcgacgagaaggacaccgaccgttacggccgcacgctgggcaccgtgtgggtcaacatggagctggccagccggccgccgcagccgcgcaacgtcaacgccgcgatggttcaccagggcatggcgtgggcctatcgcttccacggccgcgcggccgaccctgaaatgctgcggctcgaacaggaggcgcgaggcaagcgcgtcggcctctggtccgatccgcacgccgtcgagccgtggaaatggcgacgcgagagcaacaaccggagggacgaaggttgaaggtcgcccgcatctacctgcgcgccagtacggacgagcagaatcttgaacgccaggagagccttgtagcggccacgcgggccgccgggtactacgtcgccggcatctaccgcgagaaggcgtccggcgcacgcgccgaccggcccgagctgctgcgcatgatcgcggacctgcaacctggtgaagtcgtcgttgcggagaagatcgaccgcatcagccgcttgccgttggccgaggccgagcgcctggttgcgtcgatccgggccaaaggggccaagctggccgtgcctggcgtggtggacctgtcggagctggccgccgaggcgaacggagtggcgaaaatcgttctggaatccgtccaggacatgcttttgaagctcgccttgcagatggcccgcgacgactacgaggatcggcgcgagcgtcaacgtcagggtgtccagttggcgaaggccgccggccgctacaccggccgcaaacgtgacgccggcatgcacgaccgcatcatcacgcttcgctccggcggatcgagcattgccaagacggccaagctggtcggatgcagcccgagccaggtcaaacgagtgtgggcggcctggaacgcgcagcagcaaaaataaagccgggcagtgcccggcttttctcaccttttcgcgtcccgcagggccgctgcgagcgccctacctagatcctcgctttccccctcggtgtagtccggccagggcacgaagggcgcggatgcgaacctgttgagcaggtacgccttcgggcagcggtagaccaccggcgagttcgccttttcatcccaccgggccaggatcacgtccgcatcacagtgcatgtccttcacctggtcgcggaagaagccgaaggccaccatgccgctatgttcgccgaggaacgccagttgcttcgcgctggcgatcgcgccgacgccgccggccaaaaccgacgccatcacccagccgacgaaccagaagctggcatgcttgcggttgaccaccgcacgcgcagccgcgaccaggacaacggccaagctgccgaccagggccatgacgaccgtgatccggccgttgtggaaagcgatgggcttgccagcgtccgcttgcacggcgtcgtaaatgctggacccgatgggcgcgcacatcagcacgacaggcagcagcaccaggaacatcgtccgcgtccattgcgcgagtgccttgcggcgttcgccggcggcaagcgcctccatcatcggcgtgaagcccaacagggccaccgcagccgccaagccggcaacgatgccgcaggcgattacatacatacatcctccctaatgcgccttgcgcacggttgtagtcagagtccgcggtggggcgataagctcatgaccaaaatcccttaacgtgagttttcgttccactgagcgtcagaccccgtagaaaagatcaaaggatcttcttgagatcctttttttctgcgggggatcaggaccgctgccggagcgcaacccactcactacagcagagccatgtagacaacatcccctccccctttccaccgcgtcagacgcccgtagcagcccgctacgggctttttcatgccctgccctagcgtccaagcctcacggccgcgctcggcctctctggcggccttctggcgctcctgctgcggcgtccgctcgtgggccgtggcgcgggtccgcgcgccggcctcgtgcgcctggcgctcgcgggcgaggtccagggcggccgtcttcacgttctgccttgcgcagatgagatagatcgatctagcgtggactcaaggctctcgcgaatggctcgcgttggaaactttcattgacacttgaggggcaccgcagggaaattctcgtccttgcgagaaccggctatgtcgtgctgcgcatcgagcctgcgcccttggcttgtctcgcccctctccgcgtcgctacggggcttccagcgcctttccgacgctcaccgggctggttgccctcgccgctgggctggcggccgtctatggccctgcaaacgcgccagaaacgccgtcgaagccgtgtgcgagacaccgcggccgccggcgttgtggatacctcgcggaaaacttggccctcactgacagatgaggggcggacgttgacacttgaggggccgactcacccggcgcggcgttgacagatgaggggcaggctcgatttcggccggcgacgtggagctggccagcctcgcaaatcggcgaaaacgcctgattttacgcgagtttcccacagatgatgtggacaagcctggggataagtgccctgcggtattgacacttgaggggcgcgactactgacagatgaggggcgcgatccttgacacttgaggggcagagtgctgacagatgaggggcgcacctattgacatttgaggggctgtccacaggcagaaaatccagcatttgcaagggtttccgcccgtttttcggccaccgctaacctgtcttttaacctgcttttaaaccaatatttataaaccttgtttttaaccagggctgcgccctgtgcgcgtgaccgcgcacgccgaaggggggtgcccccccttctcgaaccctcccggcccgctaacgcgggcctcccatccccccaggggctgcgcccctcggccgcgaacggcctcaccccaaaaatggcagcgctggcagtccttgccattgccgggatcggggcagtaacgggatgggcgatcagcccgagcgcgacgcccggaagcattgacgtgccgcaggtgctggcatcgacattcagcgaccaggtgccgggcagtgagggcggcggcctgggtggcggcctgcccttcacttcggccgtcggggcattcacggacttcatggcggggccggcaatttttaccttgggcattcttggcatagtggtcgcgggtgccgtgctcgtgttcgggggtgaattaattccccggatcgatccgtcagcttcacgctgccgcaagcactcagggcgcaagggctgctaaaggaagcggaacacgtagaaagccagtccgcagaaacggtgctgaccccggatgaatgtcagctactgggctatctggacaagggaaaacgcaagcgcaaagagaaagcaggtagcttgcagtgggcttacatggcgatagctagactgggcggttttatggacagcaagcgaaccggaattgccagctggggcgccctctggtaaggttgggaagccctgcaaagtaaactggatggctttcttgccgccaaggatctgatggcgcaggggatcaagatcgacggatcgatccggggaattaattccggggcaatcccgcaaggagggtgaatgaatcggacgtttgaccggaaggcatacaggcaagaactgatcgacgcggggttttccgccgaggatgccgaaaccatcgcaagccgcaccgtcatgcgtgcgccccgcgaaaccttccagtccgtcggctcgatggtccagcaagctacggccaagatcgagcgcgacagcgtgcaactggctccccctgccctgcccgcgccatcggccgccgtggagcgttcgcgtcgtctcgaacaggaggcggcaggtttggcgaagtcgatgaccatcgacacgcgaggaactatgacgaccaagaagcgaaaaaccgccggcgaggacctggcaaaacaggtcagcgaggccaagcaggccgcgttgctgaaacacacgaagcagcagatcaaggaaatgcagctttccttgttcgatattgcgccgtggccggacacgatgcgagcgatgccaaacgacacggcccgctctgccctgttcaccacgcgcaacaagaaaatcccgcgcgaggcgctgcaaaacaaggtcattttccacgtcaacaaggacgtgaagatcacctacaccggcgtcgagctgcgggccgacgatgacgaactggtgtggcagcaggtgttggagtacgcgaagcgcacccctatcggcgagccgatcaccttcacgttctacgagctttgccaggacctgggctggtcgatcaatggccggtattacacgaaggccgaggaatgcctgtcgcgcctacaggcgacggcgatgggcttcacgtccgaccgcgttgggcacctggaatcggtgtcgctgctgcaccgcttccgcgtcctggaccgtggcaagaaaacgtcccgttgccaggtcctgatcgacgaggaaatcgtcgtgctgtttgctggcgaccactacacgaaattcatatgggagaagtaccgcaagctgtcgccgacggcccgacggatgttcgactatttcagctcgcaccgggagccgtacccgctcaagctggaaaccttccgcctcatgtgcggatcggattccacccgcgtgaagaagtggcgcgagcaggtcggcgaagcctgcgaagagttgcgaggcagcggcctggtggaacacgcctgggtcaatgatgacctggtgcattgcaaacgctagggccttgtggggtcagttccggctgggggttcagcagccactcgatcgaggtcccaatacgcaaaccgcctctccccgcgcgttggccgattcattaatgcagctggcacgacaggtttcccgactggaaagcgggcagtgagcgcaacgcaattaatgtgagttagctcactcattaggcaccccaggctttacactttatgcttccggctcgtatgttgtgtggaattgtgagcggataacaatttcacacaggaaacagctatgaccatgattacgccaagcttccatgggatatcgagatctcctgcagagctctagagtcgagactagtctcgacgggcccggtaccccctcgagggggccgcacttaagttacgcgtggatcgtggagctttcgggttttaactataacggtcctaaggtagcgaactcgggtcttgccttaatcccaacaaccggattatctacacggatttcaatagctgatatagcgaatcaccgagattaattaa

SEQ ID NO: 46 - DNA, 506 bp, Artificial Sequence
  origin of replication
atcacgtgctataaaaataattataatttaaattttttaatataaatatataaattaaaaatagaaagtaaaaaaagaaattaaagaaaaaatagtttttgttttccgaagatgtaaaagactctagggggatcgccaacaaatactaccttttatcttgctcttcctgctctcaggtattaatgccgaattgtttcatcttgtctgtgtagaagaccacacacgaaaatcctgtgattttacattttacttatcgttaatcgaatgtatatctatttaatctgcttttcttgtctaataaatatatatgtaaagtacgctttttgttgaaattttttaaacctttgtttatttttttttttcttcattccgtaactcttctaccttctttatttactttctaaaatccaaatacaaaacataaaaataaataaacacagagtaaattcccaaattattccatcattaaaagatacgaggcgcgtgtaagttacaggcaagcgatc

SEQ ID NO: 47 - DNA, 1020 bp, Artificial Sequence
  selectionmarker
ttcaattcatcattttttttttattcttttttttgatttcggtttccttgaaatttttttgattcggtaatctccgaacagaaggaagaacgaaggaaggagcacagacttagattggtatatatacgcatatgtagtgttgaagaaacatgaaattgcccagtattcttaacccaactgcacagaacaaaaacctgcaggaaacgaagataaatcatgtcgaaagctacatataaggaacgtgctgctactcatcctagtcctgttgctgccaagctatttaatatcatgcacgaaaagcaaacaaacttgtgtgcttcattggatgttcgtaccaccaaggaattactggagttagttgaagcattaggtcccaaaatttgtttactaaaaacacatgtggatatcttgactgatttttccatggagggcacagttaagccgctaaaggcattatccgccaagtacaattttttactcttcgaagacagaaaatttgctgacattggtaatacagtcaaattgcagtactctgcgggtgtatacagaatagcagaatgggcagacattacgaatgcacacggtgtggtgggcccaggtattgttagcggtttgaagcaggcggcagaagaagtaacaaaggaacctagaggccttttgatgttagcagaattgtcatgcaagggctccctatctactggagaatatactaagggtactgttgacattgcgaagagcgacaaagattttgttatcggctttattgctcaaagagacatgggtggaagagatgaaggttacgattggttgattatgacacccggtgtgggtttagatgacaagggagacgcattgggtcaacagtatagaaccgtggatgatgtggtctctacaggatctgacattattattgttggaagaggactatttgcaaagggaagggatgctaaggtagagggtgaacgttacagaaaagcaggctgggaagcatatttgagaagatgcggccagcaaaactaa

SEQ ID NO: 48 - DNA, 228 bp, Artificial Sequence
  SARS-CoV-2 E
atgtactcattcgtttcggaagagacaggtacgttaatagttaatagcgtacttctttttcttgctttcgtggtattcttgctagttacactagccattcttactgcgcttcgattgtgtgcgtactgttgcaatattgttaacgtgagtcttgtaaaaccttctttttacgtttactctcgtgttaaaaatctgaattcttctcgggttcctgatcttctggtctaa

SEQ ID NO: 49 - DNA, 669 bp, Artificial Sequence
  SARS-CoV-2 M
atggcagattccaacggtactattaccgttgaggagctgaaaaagctccttgaacaatggaacctagtaataggtttcctattccttacatggatttgcctgctgcaatttgcctatgccaacaggaataggtttttgtacatcattaagttgattttcctctggctgttatggccagtaactttagcttgttttgtgcttgctgctgtttacagaataaattggatcaccggtggaattgctattgcaatggcttgtcttgtaggattgatgtggctaagctacttcattgcttctttcagactgtttgcgcgtacgcgttccatgtggtcattcaatccagaaactaacattcttctcaacgtgccactccatggaactattctgactagaccgcttctagaaagtgaactcgtaatcggagctgttatccttcgtggacatcttcgtattgctggacatcatctaggacgctgtgacatcaaggatctacctaaagaaatcactgttgctacatcacgaacgctttcttattacaaattgggagcttcacagcgtgtagcaggtgattcaggttttgctgcatatagtcgctacaggattggcaactataaattaaacacagaccattccagtagcagtgacaatattgctttgcttgtacagtaa

SEQ ID NO: 50 - DNA, 1260 bp, Artificial Sequence
  SARS-CoV-2 N
atgtctgataatggacctcaaaatcagcgaaatgcacctcgcattacgtttggtggaccatcagattcaactggcagtaaccagaatggagaacgaagtggtgcgcgatcaaaacaacgccgcccgcaaggtttacccaataatactgcgtcttggttcaccgctctcactcaacatggcaaggaagatttaaaattccctcgaggacaaggcgttccaattaacaccaatagcagtccagatgaccaaattggctactaccgccgcgccacaagacgaattcgtggtggtgatggtaaaatgaaagatctcagtccaagatggtatttctactatctaggaactgggccagaagctggacttccttatggtgctaacaaagatggcatcatatgggttgcaactgagggagccttgaatacaccaaaagatcacattggcaccagaaatcctgctaacaatgctgcaatcgtgctacaacttcctcaaggaacaacattaccaaaaggtttttacgcagaagggtctagaggtggaagtcaagcctcttctagatcatcatcacgtagtcgcaacagttcaagaaattcaactccaggttcaagtagaggaacttctcctgctagaatggctggaaatggaggtgatgctgctcttgctttgttactacttgacagattgaaccagcttgagagcaaaatgtctggtaaaggccaacaacaacaaggccaaactgtcactaagaaatctgctgctgaggcttctaagaagcctagacaaaaacgtactgccactaaagcatacaatgtaacacaagctttcggcagacgtggtccagaacaaactcaaggaaattttggggatcaggaactaatcagacaaggaactgattacaaacattggccgcaaattgcacaatttgctccttctgcttcagcgttctttggaatgtcgagaattggaatggaagtcacaccttcgggaacatggttgacctatacaggtgccatcaaattggatgacaaagatccaaatttcaaagatcaagtcattttgctgaataagcatattgacgcatacaaaacattcccaccaacagagcctaaaaaggacaaaaagaagaaggctgatgaaactcaagccttaccgcagagacagaagaaacagcaaactgtgactcttcttcctgctgcagatttggatgatttctccaaacaattgcaacaatccatgagcagtgctgactcaactcaggcctaa

SEQ ID NO: 51 - DNA, 21290 bp, Artificial Sequence
  SARS-CoV-2 ORF1ab
atggagagccttgtccctggtttcaacgagaaaacacacgtccaactcagtttgcctgttttacaggttcgcgacgtgttagtacgtggttttggagattcagtggaagaagtcttatcagaggcacgtcaacatcttaaagatggcacttgtggcttagtagaagttgaaaaaggcgttttgcctcaacttgaacagccctatgtgttcatcaaacgttctgatgctagaactgcacctcatggtcatgttatggttgagctggtagcagaattagaaggtattcagtacggtcgtagtggtgagacattaggtgttttagttcctcatgtgggcgaaataccagtggcttaccgcaaagttcttcttagaaagaacggtaataaaggagctggtggccatagttacggcgctgatttaaagtcatttgacttaggcgacgagcttggcactgatccttatgaagatttccaagaaaactggaacactaaacatagcagtggtgttacccgtgaactcatgcgtgagttaaatggaggtgcatacactcgctatgtcgataacaacttctgtggacctgatggttaccctcttgagtgcattaaagaccttctagcacgtgctggtaaagcttcatgcactttgtccgaacaactggactttattgacactaagaggggtgtatactgctgccgtgaacatgagcatgaaattgcttggtacacggaacgttctgaaaagagctatgaattgcagacaccttttgaaattaaactggcaaagaaatttgacaccttcaatggggaatgtccaaattttgtatttcccctcaattccataatcaagactattcaaccaagggttgaaaagaaaaagcttgatggctttatgggtagaattcgatctgtctatccagttgcgtcaccaaatgaatgcaaccaaatgtgcctttcaactctcatgaagtgtgatcattgtggtgaaacttcatggcagacgggcgattttgttaaagccacttgcgaattttgtggcactgagaatttgactaaagaaggtgccactacttgtggttacttaccccaaaatgctgttgttaaaatttactgtccagcatgtcacaattcagaagtaggacctgagcatagtcttgccgaataccataatgaatctggcttgaaaaccattcttcgtaagggtggtcgcactattgcttttggaggatgtgtgttctcttatgttggttgccataacaagtgtgcttattgggttccacgtgcttcagctaacataggttgtaaccatacaggtgttgttggagaaggttccgaaggtcttaatgacaaccttcttgaaatactccaaaaagagaaagtcaacatcaatattgttggtgactttaaacttaatgaagagatcgccattattttggcatctttttctgcttccacaagtgcttttgtggaaactgtgaaaggtttggattataaagcattcaaacagattgttgaatcctgtggtaattttaaggttacaaagggaaaagctaaaaaaggtgcctggaatattggtgaacagaaatcaatactgagtcctctttatgcatttgcatcagaggctgctcgtgttgtacgatcaattttctcccgcactcttgaaactgctcaaaattctgtgcgtgttttacagaaggccgctataacaatactagatggaatttcacagtattcactgagactcattgatgctatgatgttcacatctgatttggctactaacaatctagttgtaatggcctacattacaggtggtgttgttcagttgacttcgcagtggctaactaacatctttggcactgtttatgaaaaactcaaacccgtccttgattggcttgaagagaagtttaaggaaggtgtagagtttcttagagacggttgggagattgttaaattcatctcaacctgtgcttgtgaaattgtcggtggacaaattgtcacctgtgctaaggaaattaaggagagtgttcagacattctttaagcttgtaaacaagtttttggctttgtgtgctgactctatcattattggtggagctaaacttaaagccttgaatttaggtgaaacatttgtcacgcactcaaagggattgtacagaaagtgtgttaaatccagagaagaaactggcctactcatgcctctaaaagccccaaaagaaattatcttcttagagggagaaacacttcccacagaagtgttaacagaggaagttgtcttgaaaactggtgatttacaaccattagaacaacctactagtgaagctgttgaagctccattggttggtacaccagtttgtattaacgggcttatgttgctcgaaatcaaagacacagaaaagtactgtgcccttgcacctaatatgatggtaacaaacaataccttcacactcaaaggcggtgcaccaacaaaggttacttttggtgatgacactgtgatagaagtgcaaggttacaagagtgtgaatatcacttttgaacttgatgaaaggattgataaagtacttaatgagaagtgctctgcctatacagttgaactcggtacagaagtaaatgagttcgcctgtgttgtggcagatgctgtcataaaaactttgcaaccagtatctgaattacttacaccactgggcattgatttagatgagtggagtatggctacatactacttatttgatgagtctggtgagtttaaattggcttcacatatgtattgttctttctaccctccagatgaggatgaagaagaaggtgattgtgaagaagaagagtttgagccatcaactcaatatgagtatggtactgaagatgattaccaaggtaaacctttggaatttggtgccacttctgctgctttacaacctgaagaagaacaagaagaagattggttagatgatgatagtcaacaaactgttggtcaacaagacggcagtgaggacaatcagacaactactattcaaacaattgttgaggttcaacctcaattagagatggaacttacaccagttgttcagactattgaagtgaatagttttagtggttatcttaaacttactgacaatgtatacatcaagaatgcagacattgtggaagaagctaaaaaggtaaaaccaacagtggttgttaatgcagccaatgtttaccttaaacatggaggaggtgttgcaggagccttaaataaggctactaacaatgccatgcaagttgaatctgatgattacatagctactaatggaccacttaaagtgggtggtagttgtgttttaagcggacacaatcttgctaaacactgtttacatgttgtcggcccaaatgttaacaaaggtgaagatattcaacttcttaagagtgcttatgaaaattttaaccagcacgaagttctacttgcaccattattatcagctggtatttttggtgctgaccctatacattctttaagagtttgtgtagatactgttcgcacaaatgtctacttagctgtctttgataaaaatctctatgacaaacttgtttcaagctttttggaaatgaagagtgaaaagcaagttgaacaaaagatcgctgagattcctaaagaggaagttaagccatttataactgaaagtaaaccttcagttgaacagagaaaacaagatgataagaagatcaaagcttgtgttgaagaagttacaacaactctggaagaaactaagttcctcacagaaaacttgctcctttatatcgacattaatggcaatcttcatccagattctgccactcttgttagtgacattgacatcactttcttaaagaaagatgctccatatatagtgggtgatgttgttcaagagggtgttttaactgctgtggttatacctactaaaaaggctggtggcactactgaaatgctagcgaaagctttgagaaaagtgccaacagacaattatataaccacttacccgggtcagggtttaaatggttacactgtagaggaggcaaagacagtgcttaaaaagtgtaaaagtgccttttacattctaccatctattatctctaatgagaagcaagaaattcttggaactgtttcttggaatttgcgagaaatgcttgcacatgcagaagaaacacgcaaattaatgcctgtctgtgtggaaactaaagccatagtttcaactatacagcgtaaatataagggtatcaagatacaagagggtgtggttgattatggtgctagattttacttttacaccagtaaaacaactgtagcgtcacttatcaacacacttaacgatctaaatgaaactcttgttacaatgccacttggctatgtaacacatggcttaaatttggaagaagctgctcggtatatgagatctctcaaagtgccagctacagtttctgtttcttcacctgatgctgttacagcgtataatggttatcttacttcttcttctaaaacacctgaagaacattttattgaaaccatctcacttgctggttcctataaagattggtcctattctggacaatctacacaactaggtatagaatttcttaagagaggtgataaaagtgtatattacacgtccaatcctaccacattccacctagatggtgaagttatcacctttgacaatcttaagacacttctttctttgagagaagtgaggactattaaggtgtttacaacagtagacaacattaacctccacacgcaagttgtggacatgtcaatgacatatggacaacagtttggtccaacttatttggatggagctgatgttactaagataaaacctcataactcacatgaaggtaaaacattttacgttttgcctaatgatgacactctacgtgttgaggcttttgagtactaccacacaactgatcctagttttctgggtaggtacatgtcagcattaaatcacactaaaaagtggaaatacccacaagttaatggtttaacttcgattaaatgggcagataacaactgttatcttgccactgcattgttaacactccaacaaatagagttgaagtttaatccacctgctctacaagatgcttattacagagcaagggctggtgaagctgctaacttttgtgcacttatcttagcctactgtaataagacagtaggtgagttaggtgatgttagagaaacaatgagttacttgtttcaacatgccaatttagattcttgcaaaagagtcttgaacgtggtgtgtaaaacttgtggacaacagcagacaacccttaagggtgtagaagctgttatgtacatgggcacactttcttatgaacaattcaagaaaggtgttcagataccttgtacgtgtggtaaacaagctacaaaatatctagtacaacaggagtcaccttttgttatgatgtcagcaccacctgctcagtatgaacttaagcatggtacatttacttgtgctagtgagtacactggtaattaccagtgtggtcactataagcatataacttctaaggaaactttgtattgcatagacggtgctttacttacaaagtcctcagaatacaaaggtcctattacggatgttttctacaaagaaaacagttacacaacaaccataaaaccagttacttataagttggatggtgttgtttgtacagaaattgaccctaagttggacaattattataagaaggacaactcttatttcacagagcaaccaattgatcttgtaccaaaccaaccatatccaaacgcaagcttcgataattttaagttcgtatgcgataatatcaaatttgctgatgatctcaaccagttaactggttataagaaacctgcttcaagagagcttaaagttacatttttccctgacttaaatggtgatgtggtggctattgattataaacactacacaccctcttttaagaaaggagctaaattgttacataagcctattgtttggcatgttaacaatgcaactaataaagccacgtataaaccaaatacctggtgtatacgttgtctttggagcacaaaaccagttgaaacatcaaattcgtttgatgtactgaagtcagaggacgcgcagggaatggataatcttgcatgtgaagatctaaaaccagtctctgaagaagtagtggaaaatcctaccatacagaaagacgttcttgagtgtaatgtgaaaactaccgaagttgtaggagacattatacttaaaccagcaaataatagtttgaagatcacagaagaggttggccacacagatctaatggctgcttatgtagacaattctagtcttactattaagaaacctaatgaactctctagagtattaggtttgaaaacccttgctactcatggtttagctgctgttaatagtgtcccttgggatactatagctaattatgctaagccttttcttaacaaagttgttagtacaactactaacatagttacacggtgtcttaatcgtgtttgtactaattatatgccttacttctttactttattgctacaattgtgtacttttactagaagtacaaattctagaatcaaggcatctatgccgactactatagcaaagaatactgttaagagtgtcggtaaattttgtctagaggcttcatttaattatctcaagtcacctaacttttctaagctgataaacattatcatctggtttttgctattaagtgtttgcctaggttctttaatctactcaaccgctgctttaggtgttttaatgtctaatttaggcatgccttcttactgtactggttacagagaaggctatttgaactctactaatgtcactattgcaacctactgtactggatctataccttgtagtgtttgtcttagtggtttagattctttagacacctatccttctcttgaaactatacagattaccatttcatctttcaaatgggatttaactgcttttggcttagttgcagagtggtttttggcatatattcttttcactaggtttttctatgtacttggattggctgcaatcatgcaattgtttttcagctattttgcagtccattttattagtaactcttggcttatgtggcttataattaatcttgtgcagatggccccgatttcagctatggttagaatgtacatcttctttgcctcattttattatgtgtggaaaagttatgtgcatgttgtagacggttgtaattcatcaacttgtatgatgtgttacaaacgtaatagagcaacaagagtcgaatgtacaactattgttaatggtgttagaaggtccttttatgtctatgctaatggaggtaaaggcttttgcaaactacacaattggaattgtgttaattgtgatacattctgtgctggtagtacatttattagtgatgaagttgcgagagacttgtcactacagtttaaaagaccaataaatcctactgaccaatcttcttacatcgttgatagtgttacagtgaagaatggttccatccatctttactttgataaagctggtcaaaagacttatgaaagacattctctctctcattttgttaacttagacaacctgagagctaataacactaaaggttcattgcctattaatgttatcgttttcgacggtaaatcaaaatgtgaagaatcatctgcaaaatcagcgtctgtttactacagtcagcttatgtgtcaacctatactgttactagatcaggcattagtgtctgatgttggtgatagtgcggaagttgcagttaaaatgtttgatgcttacgttaatacgttttcatcaacttttaacgtaccaatggaaaaactcaaaacactagttgcaactgcagaagctgaacttgcaaagaatgtgtccttagacaatgtcttatctacgtttatttcagcagctcggcaagggtttgttgattcagatgtagaaactaaagatgttgttgaatgtcttaaattgtcacatcaatctgacatagaagttactggcgatagttgtaataactatatgctcacctataacaaagttgaaaacatgacaccccgtgaccttggtgcttgtattgactgtagtgctagacatattaatgcgcaggtagcaaaaagtcacaacattgctttgatatggaacgttaaagatttcatgtcattgtctgaacaactacgaaaacaaatacgtagtgctgctaaaaagaataacttacccttcaagttgacatgtgcaactactagacaagttgttaatgttgtaacaacaaagatagcacttaagggtggtaaaattgtgaataactggttgaagcagcttattaaagttacacttgtgttcctttttgttgctgctattttctatctgataacacctgttcatgtcatgtctaaacatactgacttttcaagtgaaatcataggatacaaggctattgatggtggtgtcactcgtgacatagcatctacagatacttgttttgctaacaaacatgctgattttgacacatggtttagccagcgtggtggtagttatactaatgacaaagcttgcccattgattgctgcagtcataacaagagaagtgggttttgtcgttcctggtttgcctggaacgatattacgcacaactaatggtgactttttgcatttcttacctagagtttttagtgcagttggtaacatctgttacacaccatcaaaacttatagagtacactgactttgcaacatcagcttgtgttttggctgctgaatgtacaatttttaaagacgcttctggtaagccagtaccatattgttatgataccaatgtactagaaggttctgttgcttatgaaagtttacgccctgacacacgttatgtgctcatggatggctctattattcaatttcctaacacctaccttgaaggttctgtaagagtggtaacaacttttgattctgagtactgtaggcacggcacttgtgaaagatcagaagctggtgtttgtgtatctactagtggtagatgggtacttaacaacgattattacagatctttaccaggagttttctgtggtgtagatgctgtaaatttgcttactaacatgtttacaccactaattcaacctattggtgctttggacatatcagcatctatagtagctggtggtattgtagctatcgtagtaacatgccttgcctactattttatgaggtttagacgtgcttttggtgaatacagtcatgtagttgcctttaatactctcctattccttatgtcattcactgtactctgtttaacaccagtttactcattcttacctggtgtttattctgttatttacctgtacttgacattttatctgactaatgatgtttcttttctcgcacatattcagtggatggttatgttcacacctttagtacctttctggataacaattgcttacatcatttgtatttccacaaagcatttctattggttctttagtaattacctaaagagacgtgtagtctttaatggtgtttcctttagtacttttgaagaagctgcgctgtgcacctttttgttaaataaggagatgtatctaaagttgcgtagtgatgtgctattacctcttacgcaatataatagatacttagctctttataacaagtacaagtatttcagtggagcaatggatacaactagctacagagaagctgcttgttgtcatctcgcaaaggctctcaatgacttcagtaactcaggttctgatgttctttaccaaccaccacaaacctctatcacctcagctgttttgcagagtggttttagaaaaatggcattcccatctggtaaagttgagggttgtatggtacaagtaacttgtggtacaactacacttaacggtctttggcttgatgacgtagtttactgtccaagacatgtgatctgcacctctgaagatatgcttaaccctaattatgaagatctactcatccgtaagtctaatcataacttcttggtacaggctggtaatgttcaactcagggttattggacattctatgcaaaattgtgtacttaagcttaaggttgatacagccaatcctaagacacctaagtataagtttgttcgcattcaaccaggacagactttttcagtgttagcttgttacaatggttcaccatctggtgtttaccaatgtgctatgaggcccaatttcactattaagggttcattccttaatggttcatgtggtagtgttggttttaacatagattatgactgtgtctctttttgttacatgcaccatatggaattaccaactggagttcatgctggcacagacttagaaggtaacttttatggaccttttgttgacaggcaaacagcacaagcagctggtacagatacaactattacagttaatgttcttgcttggttgtacgctgctgttataaatggagacaggtggtttctcaatcgatttaccacaactcttaatgactttaaccttgtggctatgaagtacaattatgaacctctaacacaagaccatgttgacatactaggacctctttctgctcaaactggaattgccgttttagatatgtgtgcttcattaaaagaacttctgcaaaatggtatgaatggacgtaccatattgggtagtgctttattagaagatgagtttacaccttttgatgttgttagacaatgctcaggtgttactttccaaagtgcagtgaaaagaacaatcaagggtacacaccactggttgttactcacaattttgacttcacttttagttttagtccagagtactcaatggtctttgttctttttcttctacgaaaatgcctttttaccttttgctatgggtattattgctatgtctgcttttgcaatgatgtttgtcaaacataagcatgcatttctctgtttgtttttgttaccttctcttgccactgtagcttactttaatatggtctacatgcctgctagttgggtgatgcgtattatgacatggttggatatggttgatactagtttgtctggttttaagctaaaagactgtgttatgtatgcatcagctgtagtgttactaatccttatgacagcaagaactgtgtatgatgatggtgctaggagagtgtggacacttatgaatgtcttgacactcgtttataaagtttactatggcaacgctttagatcaagccatttccatgtgggctcttataatctctgttacttctaactactcaggtgtagttacaactgtcatgtttttggccagaggtattgtttttatgtgtgttgagtattgccctattttcttcataactggtaatacacttcagtgtataatgctagtctattgtttcttaggctatttttgtacttgttacttcggcctcttttgtttactcaaccgctactttagactgactcttggtgtttatgattacttagtgtctacacaggagtttagatatatgaattcacagggactactcccacccaagaatagcatagatgccttcaaactcaacattaaattgttgggtgttggtggcaaaccttgtatcaaagtagccactgtacagtctaaaatgtcagatgtaaagtgcacatcagtagtcttactctcagttttgcaacaactcagagtagaatcatcatctaaattgtgggctcaatgtgtccagttacacaatgacattctcttagctaaagatactactgaagcctttgaaaaaatggtttcactactttctgttttgctttccatgcagggtgctgtagacataaacaagctttgtgaagaaatgctggacaacagggcaaccttacaagctatagcctcagagtttagttcccttccatcatatgcagcttttgctactgctcaagaagcttatgagcaggctgttgctaatggtgattctgaagttgttcttaaaaagttgaagaagtctttgaatgtggctaaatctgaatttgaccgtgatgcagccatgcaacgtaagttggaaaagatggctgatcaagctatgacccaaatgtataaacaggctagatctgaggacaagagggcaaaagttactagtgctatgcagacaatgcttttcactatgcttagaaagttggataatgatgcactcaacaacattatcaacaatgcaagagatggttgtgttcccttgaacataatacctcttacaacagcagccaaactaatggttgtcataccagactacaacacatataagaatacgtgtgatggtacaacatttacttatgcatcagcattgtgggaaatccaacaggttgtagatgcagatagtaaaattgttcagcttagtgaaattagtatggacaattcacctaatttagcatggcctcttattgtaacagctttaagggccaattctgctgtcaaattacagaataatgagcttagtcctgttgcactaagacaaatgtcttgtgctgccggtactacacaaactgcttgcactgatgacaatgcgttagcttactacaacacaacaaagggaggtaggtttgtacttgcactgttatccgatttacaggatttgaaatgggctagattccctaagagtgatggaactggtactatctatacagaactggaaccaccttgtaggtttgttacagacacacctaaaggtcctaaagtgaagtatctttacttcatcaaaggattaaacaacctaaatagaggtatggtacttggtagtttagctgccacagtacgtttacaagctggtaatgcaacagaagttcctgctaattcaactgtactttctttctgtgcttttgctgtagatgctgctaaagcttacaaagattatctagctagtgggggacaaccaatcactaattgtgttaagatgttgtgtacacacactggtactggtcaggcaataacagttacaccggaagccaatatggatcaagaatcctttggtggtgcatcgtgttgtctgtactgccgttgtcatatagatcatccaaatcctaaaggattttgtgacttaaaaggtaagtatgtacaaatacctacaacttgtgctaatgaccctgtgggttttacacttaaaaacacagtctgtaccgtctgcggtatgtggaaaggttatggttgtagttgtgatcaactccgcgaacccatgcttcagtcagctgatgcacaatcgtttttaaacgggtttgcggtgtaagtgcagcccgtcttacaccgtgcggcacaggcactagtactgatgtcgtatatagagcttttgacatctacaatgataaagtagctggttttgctaagttcctaaaaactaattgttgtcgcttccaagaaaaggacgaagatgacaatctcattgattcttactttgtagttaagagacacactttctctaactaccaacatgaagaaacaatttacaacctgcttaaggattgtccagctgttgctaaacatgacttctttaagtttagaatagacggtgacatggtaccacatatatcacgtcaacgtcttactaaatacacaatggcagacctcgtctatgctttaaggcattttgatgaaggtaattgtgacacattaaaagaaatacttgtcacatacaattgttgtgatgatgactacttcaataaaaaggactggtatgattttgtagaaaacccagatatattacgcgtatacgccaacttaggtgaacgtgtacgccaagctttgttaaaaacagtacagttctgtgatgccatgcgaaatgctggtattgttggtgtactgacattagataatcaagatctcaatggtaactggtatgactttggtgatttcatacaaaccacgccaggtagtggagttcctgttgtagactcttattattcattgctcatgcctatattaaccttgaccagggctttaactgcagagtcacatgttgacactgacttaacaaagccttacattaagtgggatttgttaaaatacgacttcacggaagagaggttaaaactctttgaccgttattttaaatactgggatcagacataccacccaaattgtgttaactgtttggatgacagatgcattctgcattgtgcaaactttaatgttctgttctctacagtgttcccacctacaagttttggaccactagtgagaaaaatatttgttgatggtgttccatttgtagtttcaactggataccacttcagagagctaggtgttgtacataatcaggatgtaaacttacatagctctagacttagttttaaggaattacttgtgtatgctgctgatcctgctatgcatgctgcttctggtaatctattactagataaacgcactacgtgcttttcagtagctgcacttactaacaatgttgcttttcaaactgtcaaacccggtaattttaacaaggacttctatgactttgctgtgtctaagggtttctttaaggaaggaagttctgttgaattaaaacacttcttctttgctcaggatggtaatgctgctatcagcgattatgactactatcgttataatctaccaacaatgtgtgatatcagacaactactatttgtagttgaagttgttgataagtactttgattgttacgatggtggctgtattaatgctaaccaagtcatcgtcaacaacctagacaaatcagctggttttccatttaataaatggggtaaggctagactttattatgattccatgagttatgaggatcaagatgcacttttcgcatatacaaaacgtaatgtcatccctactataactcaaatgaaccttaagtatgccattagtgcaaagaatagagctcgcaccgtagctggtgtctctatctgtagtactatgaccaatagacagtttcatcaaaaattactcaagtcaatagccgccactagaggagctactgtagtaattggaacaagcaaattctatggtggttggcacaacatgctcaaaactgtttatagtgatgtagaaaaccctcaccttatgggttgggattatcctaaatgtgatagagccatgcctaacatgcttagaattatggcctcacttgttcttgctcgcaaacatacaacgtgttgtagcttgtcacaccgtttctatagattagctaatgagtgtgctcaagtattgagtgaaatggtcatgtgtggcggttcactatatgttaaaccaggtggaacctcatcaggagatgccacaactgcttatgctaatagtgtgtttaacatttgtcaagctgtcacggccaatgttaatgcacttttatctactgatggtaacaaaattgccgataagtatgtccgcaatttacaacacagactttatgagtgtctctatagaaatagagatgttgacacagactttgtgaatgagttttacgcatatttgcgtaaacatttctcaatgatgatactctctgacgatgctgttgtgtgtttcaatagcacttatgcatctcaaggtctagtggctagcataaagaactttaagtcagttctttactatcaaaacaacgtttttatgtctgaagcaaaatgttggactgagactgaccttactaaaggacctcatgaattttgctctcaacatacaatgctagttaaacagggtgatgattatgtgtaccttccttacccagatccatcaagaatcctaggtgccggttgttttgtagatgatatcgtaaaaacagatggtacacttatgattgaacggttcgtgtctttagctatagatgcttacccacttactaaacatcctaatcaggagtatgctgatgtctttcatttgtacttacaatacatacgtaagctacatgatgagttaacaggacacatgttagacatgtattctgttatgcttactaatgataacacttcaaggtattgggaacctgagttttatgaggctatgtacacaccgcatacagtcttacaagctgttggtgcttgtgttctttgcaattcacagacttcattaagatgtggtgcttgcatacgtagaccattcttatgttgtaaatgctgttacgaccatgtcatctcaacatcacataaattagtcttgtctgttaatccgtatgtttgcaatgctccaggttgtgatgtcacagatgtgactcaactttacttaggaggtatgagctattactgtaagtcacataaaccacccattagttttccattgtgtgctaatggacaagtttttggtctctacaagaatacatgtgttggtagcgataatgttactgactttaatgcaattgcaacatgtgactggacaaatgctggtgattacattttagctaacacctgtactgaaagactcaagctttttgcagcagaaacgctcaaagctactgaggagacatttaaactgtcttatggtattgctactgtacgtgaagtgctgtctgacagagaattacatctttcatgggaagttggtaaacctagaccaccacttaaccgaaattatgtctttactggttatcgtgtaactaaaaacagtaaagtgcaaatcggagagtacacctttgaaaaaggtgactatggtgatgctgttgtttaccgaggtacaacaacttacaaactcaacgttggtgattattttgtgctgacatcacatacagtaatgccattaagtgcacctacactagtgccacaagagcactatgttagaattactggcttatacccaacactcaatatctcagatgagttttctagcaatgttgcaaattatcaaaaggttggtatgcaaaagtattctacactccagggaccacctggtactggtaaaagtcattttgctattggtctagctctctactacccttctgctcgcatagtatatacagcttgctctcatgcagctgttgatgcactatgtgagaaggcattaaaatatttgcccatagacaaatgtagtagaattatacctgcacgtgctcgtgtagagtgttttgataaattcaaggtgaattcaacattagaacagtatgtcttttgtactgtaaatgcattgcctgagacgacagcagatatagttgtctttgatgaaatttcaatggccacaaattatgatttgagtgttgtcaatgccagattacgtgctaagcactatgtgtacattggtgatcctgctcaattacctgcaccacgcacattactaactaagggtacactagaaccagaatatttcaattcagtgtgtagacttatgaaaactataggtccagacatgttcctcggaacttgtcgtagatgtcctgctgaaattgttgacactgtgagtgctttggtttatgataataagcttaaggcacataaagacaaatcagctcaatgctttaaaatgttctacaagggtgttatcacgcatgatgtttcatctgcaattaacaggccacaaataggcgtggtaagagaattccttacacgtaaccctgcttggagaaaagctgtctttatttcaccttacaattcccagaatgctgtagcctcaaagattttgggactaccaactcaaactgttgattcatcacagggctcagaatatgactatgtcatattcactcaaaccactgaaacagctcactcttgtaatgtaaacagattcaacgttgctattaccagagcaaaagtaggcatactttgcataatgtctgatagagacctttatgacaagttgcaatttacaagtcttgaaattccacgtaggaatgtggcaactttacaagctgaaaatgtaacaggactctttaaagattgtagtaaggtaatcactgggttacatcctacacaggcacctacacacttaagtgttgatactaaattcaaaactgaaggtttatgtgttgacatacctggcatacctaaggacatgacctatagaagattaatctctatgatgggtttcaaaatgaattaccaggttaatggttaccctaacatgtttatcacccgcgaagaagctataagacatgtacgtgcatggattggcttcgatgtcgaaggttgtcatgctactagagaagctgttggtaccaatttacctttacagctaggtttttctacaggtgttaacctagttgctgtacctacaggttatgttgatacacctaataatacagatttttccagagttagtgctaaaccaccgcctggagatcaatttaaacacctcataccacttatgtacaaaggacttccttggaatgtagtgcgtataaagattgtccaaatgttaagtgacacacttaaaaatctctctgacagagtcgtatttgtcttatgggcacatggctttgagttgacatctatgaagtattttgtgaagatcggacctgagcgcacatgttgtctatgtgatagacgtgctacatgcttttccactgcttcagacacttatgcctgttggcatcattctattggatttgattacgtctataatccgtttatgattgatgttcaacaatggggttttacaggtaacctacaaagcaaccatgatctgtattgtcaagtccatggtaatgcacatgtagctagttgtgatgcaatcatgactaggtgtctagctgtccacgagtgctttgttaagcgtgttgactggactattgaatatcctataatcggtgatgaactgaagattaatgcggcttgtagaaaggttcaacacatggttgttaaagctgcattattagcagacaaattcccagttcttcacgacattggtaaccctaaagctattaagtgtgtacctcaagctgatgtagaatggaagttctatgatgcacagccttgtagtgacaaagcttacaaaatagaagaactgttctattcttatgccacacattctgacaaattcacagatggtgtatgcctattttggaattgcaatgtcgatagatatcctgctaattccattgtttgtagatttgacactagagtgctatctaaccttaacttgcctggttgtgatggtggcagtttgtatgtaaataagcatgcattccacacaccagcttttgataaaagtgcttttgttaatctaaagcaacttccatttttctattactctgacagtccatgtgagtctcatggaaaacaagtagtgtcagatatagattatgtaccactaaagtctgctacgtgtataacacgttgcaatttaggtggtgctgtctgtagacatcatgctaatgagtacagattgtatctcgatgcttataacatgatgatctcagctggctttagcttgtgggtttacaaacaatttgatacctataacctctggaacacttttacaagacttcagagtttagaaaatgtggcttttaatgttgtaaataagggacactttgatggacaacagggtgaagtaccagtttctatcattaacaacactgtttacacaaaagttgatggtgttgatgtagaattgtttgagaacaaaaccacattacctgttaatgtagcatttgagctttgggctaagcgcaacattaaaccagtaccagaggtgaaaatactcaataatttgggtgtggacattgctgctaatactgtgatctgggactacaaaagagatgctccagcacatatatctactattggtgtttgttctatgactgacatagccaagaaaccaactgaaacgatttgtgcaccactcactgtcttttttgatggtagagttgatggtcaagtagacttatttagaaatgcccgtaatggtgttcttattacagaaggtagtgttaaaggtttacaaccatctgtaggtcccaaacaagctagtcttaatggagtcacattaattggagaagccgtaaaaacacagttcaattattacaagaaagtggatggtgttgtccaacaattacctgaaacttactttactcagagtagaaacttacaggaatttaagcccaggagtcaaatggaaattgatttcttagaacttgctatggatgaattcattgaacggtataaattagaaggctatgccttcgaacatatcgtttatggagattttagtcatagtcagttaggtggtttacatctactgattggactagctaaacgttttaaggaatcaccttttgaacttgaagattttattcctatggacagtacagttaaaaactacttcataacagatgcgcaaacaggttcatctaagtgtgtgtgttctgttattgatcttttacttgatgacttcgttgaaataataaagtcccaagatttatctgtagtttctaaggttgtcaaagtgactattgactatacagaaatctcatttatgctttggtgtaaagatggccatgtagaaacattttacccaaaattacaatctagtcaagcgtggcaaccgggtgttgctatgcctaatctttacaaaatgcaaagaatgctattagaaaagtgtgaccttcaaaattatggtgatagtgcaacattacctaaaggcataatgatgaatgtcgcaaaatatactcaactgtgtcaatatttaaacacactgacattagctgtaccctataatatgagagttatccattttggtgctggttctgataaaggagttgcaccaggtacagctgttttaagacaatggttgcctacaggtacgctgcttgtcgattcagatcttaatgactttgtctctgatgcagattcaactttgattggtgattgtgcaactgtacatacagctaataaatgggatctcattattagtgatatgtacgaccctaagactaagaatgtcacaaaagaaaacgactctaaagagggttttttcacttacatttgtgggtttatacaacaaaagctagctcttggaggttccgtggctataaagataacagaacattcttggaatgctgatctttataagctcatgggacacttcgcatggtggacagcctttgttactaatgtgaatgcgtcatcatctgaagcatttttaatcggatgtaactaccttggcaaaccacgcgaacaaatagatggttatgtcatgcatgcaaattacatattttggaggaatacaaatccaattcagctttcttcttattctttattcgacatgagtaaattcccccttaaattaaggggtactgctgttatgtctttaaaagaaggtcaaatcaatgatatgattctctctcttcttagtaaaggtagacttataattagagaaaacaacagagttgttatttctagtgatgttcttgttaacaactaa

SEQ ID NO: 52 - DNA, 828 bp, Artificial Sequence
  SARS-CoV-2 ORF3a
atggatttgtttatgagaatcttcacaattggaactgtaactttgaagcaaggtgaaatcaaggatgctactccttcagattttgttagagctactgcaacgataccgatacaagcatcacttcctttcggatggcttattgttggcgttgcacttcttgctgtttttcagagcgcttccaaaatcataaccctcaaaaagagatggcaactagcactctccaagggtgttcactttgtttgcaacttgctgttgttgtttgtaacagtttactcacatcttttgcttgttgctgctggccttgaagccccttttctctatctttatgctttagtctacttcttgcagagtataaactttgtacgcataataatgaggctttggctttgctggaaatgccgttccaaaaacccattactttatgatgccaactattttctttgctggcatactaattgttacgactattgtataccttacaatagtgtaacttcttcaattgtcattacttcaggtgatggcacaacaagtcctatttctgaacatgactaccagattggtggttatactgaaaaatgggaatctggagtaaaagactgtgttgtattacacagttacttcacttcagactattaccagctgtactcaactcaattgagtacagacactggtgttgaacatgttaccttcttcatctacaataaaatcgttgatgagcctgaagaacatgtccaaattcacacaatcgacgtttcatccggagttgttaatccagtaatggaaccaatttatgatgaaccgacgacgactactagcgtgcctttgtaa

SEQ ID NO: 53 - DNA, 186 bp, Artificial Sequence
  SARS-CoV-2 ORF6
atgtttcatctcgttgactttcaggttactatagcagagatattactaatcatcatgaggacttttaaagtttccatttggaatcttgattacatcataaacctcataattaagaacttaagcaagtcactaactgagaataaatattctcaactagacgaggagcagccaatggagattgattaa

SEQ ID NO: 54 - DNA, 366 bp, Artificial Sequence
  SARS-CoV-2 ORF7a
atgaaaattattcttttcttggcactgataacactcgctacttgtgagctttatcactaccaagagtgtgttagaggtacaacagtacttttaaaagaaccttgctcgtcgggaacatacgagggcaattcaccatttcatcctctagctgataacaaatttgcactgacttgctttagcactcaatttgcttttgcttgtcctgacggcgtaaaacacgtctatcagttacgtgccagatcagtttcacctaaactgttcatcagacaagaggaagttcaagaactttactctccaatttttcttattgttgcggcaatagtgtttataacactttgcttcacactcaaaagaaagacagaatga

SEQ ID NO: 55 - DNA, 366 bp, Artificial Sequence
  SARS-CoV-2 ORF8
atgaaatttcttgttttcttaggaatcatcacaactgtagctgcatttcaccaagaatgtagtttacagtcatgtactcaacatcaaccatatgtagttgatgacccgtgtcctattcacttctattctaaatggtatatcagagtaggagctagaaaatcagcacctttaattgaattgtgcgtggatgaggctggttctaaatcacccattcagtacatcgatatcggtaattatacagtttcctgtttaccttttacaattaactgccaggaacctaaattgggtagtcttgtagtgcgttgttcgttctacgaggactttttagagtatcatgacgttcgtgttgttttagatttcatctaa

SEQ ID NO: 56 - DNA, 265 bp, Artificial Sequence
  SARS-CoV-2 5'UTR
attaaaggtttataccttcccaggtaacaaaccaaccaactttcgatctcttgtagatctgttctctaaacgaactttaaaatctgtgtggctgtcactcggctgcatgcttagtgcactcacgcagtataattaataactaattactgtcgttgacaggacacgagtaactcgtctatcttctgcaggctgcttacggtttcgtccgtgttgcagccgatcatcagcacatctaggtttcgtccgggtgtgaccgaaaggtaag

SEQ ID NO: 57 - DNA, 206 bp, Artificial Sequence
  SARS-CoV-2 3'UTR
caatctttaatcagtgtgtaacattagggaggacttgaaagagccaccacattttcaccgaggccacgcggagtacgatcgagtgtacagtgaacaatgctagggagagctgcctatatggaagagccctaatgtgtaaaattaattttagtagtgctatccccatgtgattttaatagcttcttaggagaatgacaaaaaaaaac

SEQ ID NO: 58 - DNA, 13203 bp, Artificial Sequence
  SARS-CoV-2 orf1a
atggagagccttgtccctggtttcaacgagaaaacacacgtccaactcagtttgcctgttttacaggttcgcgacgtgttagtacgtggttttggagattcagtggaagaagtcttatcagaggcacgtcaacatcttaaagatggcacttgtggcttagtagaagttgaaaaaggcgttttgcctcaacttgaacagccctatgtgttcatcaaacgttctgatgctagaactgcacctcatggtcatgttatggttgagctggtagcagaattagaaggtattcagtacggtcgtagtggtgagacattaggtgttttagttcctcatgtgggcgaaataccagtggcttaccgcaaagttcttcttagaaagaacggtaataaaggagctggtggccatagttacggcgctgatttaaagtcatttgacttaggcgacgagcttggcactgatccttatgaagatttccaagaaaactggaacactaaacatagcagtggtgttacccgtgaactcatgcgtgagttaaatggaggtgcatacactcgctatgtcgataacaacttctgtggacctgatggttaccctcttgagtgcattaaagaccttctagcacgtgctggtaaagcttcatgcactttgtccgaacaactggactttattgacactaagaggggtgtatactgctgccgtgaacatgagcatgaaattgcttggtacacggaacgttctgaaaagagctatgaattgcagacaccttttgaaattaaactggcaaagaaatttgacaccttcaatggggaatgtccaaattttgtatttcccctcaattccataatcaagactattcaaccaagggttgaaaagaaaaagcttgatggctttatgggtagaattcgatctgtctatccagttgcgtcaccaaatgaatgcaaccaaatgtgcctttcaactctcatgaagtgtgatcattgtggtgaaacttcatggcagacgggcgattttgttaaagccacttgcgaattttgtggcactgagaatttgactaaagaaggtgccactacttgtggttacttaccccaaaatgctgttgttaaaatttactgtccagcatgtcacaattcagaagtaggacctgagcatagtcttgccgaataccataatgaatctggcttgaaaaccattcttcgtaagggtggtcgcactattgcttttggaggatgtgtgttctcttatgttggttgccataacaagtgtgcttattgggttccacgtgcttcagctaacataggttgtaaccatacaggtgttgttggagaaggttccgaaggtcttaatgacaaccttcttgaaatactccaaaaagagaaagtcaacatcaatattgttggtgactttaaacttaatgaagagatcgccattattttggcatctttttctgcttccacaagtgcttttgtggaaactgtgaaaggtttggattataaagcattcaaacagattgttgaatcctgtggtaattttaaggttacaaagggaaaagctaaaaaaggtgcctggaatattggtgaacagaaatcaatactgagtcctctttatgcatttgcatcagaggctgctcgtgttgtacgatcaattttctcccgcactcttgaaactgctcaaaattctgtgcgtgttttacagaaggccgctataacaatactagatggaatttcacagtattcactgagactcattgatgctatgatgttcacatctgatttggctactaacaatctagttgtaatggcctacattacaggtggtgttgttcagttgacttcgcagtggctaactaacatctttggcactgtttatgaaaaactcaaacccgtccttgattggcttgaagagaagtttaaggaaggtgtagagtttcttagagacggttgggagattgttaaattcatctcaacctgtgcttgtgaaattgtcggtggacaaattgtcacctgtgctaaggaaattaaggagagtgttcagacattctttaagcttgtaaacaagtttttggctttgtgtgctgactctatcattattggtggagctaaacttaaagccttgaatttaggtgaaacatttgtcacgcactcaaagggattgtacagaaagtgtgttaaatccagagaagaaactggcctactcatgcctctaaaagccccaaaagaaattatcttcttagagggagaaacacttcccacagaagtgttaacagaggaagttgtcttgaaaactggtgatttacaaccattagaacaacctactagtgaagctgttgaagctccattggttggtacaccagtttgtattaacgggcttatgttgctcgaaatcaaagacacagaaaagtactgtgcccttgcacctaatatgatggtaacaaacaataccttcacactcaaaggcggtgcaccaacaaaggttacttttggtgatgacactgtgatagaagtgcaaggttacaagagtgtgaatatcacttttgaacttgatgaaaggattgataaagtacttaatgagaagtgctctgcctatacagttgaactcggtacagaagtaaatgagttcgcctgtgttgtggcagatgctgtcataaaaactttgcaaccagtatctgaattacttacaccactgggcattgatttagatgagtggagtatggctacatactacttatttgatgagtctggtgagtttaaattggcttcacatatgtattgttctttctaccctccagatgaggatgaagaagaaggtgattgtgaagaagaagagtttgagccatcaactcaatatgagtatggtactgaagatgattaccaaggtaaacctttggaatttggtgccacttctgctgctttacaacctgaagaagaacaagaagaagattggttagatgatgatagtcaacaaactgttggtcaacaagacggcagtgaggacaatcagacaactactattcaaacaattgttgaggttcaacctcaattagagatggaacttacaccagttgttcagactattgaagtgaatagttttagtggttatcttaaacttactgacaatgtatacatcaagaatgcagacattgtggaagaagctaaaaaggtaaaaccaacagtggttgttaatgcagccaatgtttaccttaaacatggaggaggtgttgcaggagccttaaataaggctactaacaatgccatgcaagttgaatctgatgattacatagctactaatggaccacttaaagtgggtggtagttgtgttttaagcggacacaatcttgctaaacactgtttacatgttgtcggcccaaatgttaacaaaggtgaagatattcaacttcttaagagtgcttatgaaaattttaaccagcacgaagttctacttgcaccattattatcagctggtatttttggtgctgaccctatacattctttaagagtttgtgtagatactgttcgcacaaatgtctacttagctgtctttgataaaaatctctatgacaaacttgtttcaagctttttggaaatgaagagtgaaaagcaagttgaacaaaagatcgctgagattcctaaagaggaagttaagccatttataactgaaagtaaaccttcagttgaacagagaaaacaagatgataagaagatcaaagcttgtgttgaagaagttacaacaactctggaagaaactaagttcctcacagaaaacttgctcctttatatcgacattaatggcaatcttcatccagattctgccactcttgttagtgacattgacatcactttcttaaagaaagatgctccatatatagtgggtgatgttgttcaagagggtgttttaactgctgtggttatacctactaaaaaggctggtggcactactgaaatgctagcgaaagctttgagaaaagtgccaacagacaattatataaccacttacccgggtcagggtttaaatggttacactgtagaggaggcaaagacagtgcttaaaaagtgtaaaagtgccttttacattctaccatctattatctctaatgagaagcaagaaattcttggaactgtttcttggaatttgcgagaaatgcttgcacatgcagaagaaacacgcaaattaatgcctgtctgtgtggaaactaaagccatagtttcaactatacagcgtaaatataagggtatcaagatacaagagggtgtggttgattatggtgctagattttacttttacaccagtaaaacaactgtagcgtcacttatcaacacacttaacgatctaaatgaaactcttgttacaatgccacttggctatgtaacacatggcttaaatttggaagaagctgctcggtatatgagatctctcaaagtgccagctacagtttctgtttcttcacctgatgctgttacagcgtataatggttatcttacttcttcttctaaaacacctgaagaacattttattgaaaccatctcacttgctggttcctataaagattggtcctattctggacaatctacacaactaggtatagaatttcttaagagaggtgataaaagtgtatattacacgtccaatcctaccacattccacctagatggtgaagttatcacctttgacaatcttaagacacttctttctttgagagaagtgaggactattaaggtgtttacaacagtagacaacattaacctccacacgcaagttgtggacatgtcaatgacatatggacaacagtttggtccaacttatttggatggagctgatgttactaagataaaacctcataactcacatgaaggtaaaacattttacgttttgcctaatgatgacactctacgtgttgaggcttttgagtactaccacacaactgatcctagttttctgggtaggtacatgtcagcattaaatcacactaaaaagtggaaatacccacaagttaatggtttaacttcgattaaatgggcagataacaactgttatcttgccactgcattgttaacactccaacaaatagagttgaagtttaatccacctgctctacaagatgcttattacagagcaagggctggtgaagctgctaacttttgtgcacttatcttagcctactgtaataagacagtaggtgagttaggtgatgttagagaaacaatgagttacttgtttcaacatgccaatttagattcttgcaaaagagtcttgaacgtggtgtgtaaaacttgtggacaacagcagacaacccttaagggtgtagaagctgttatgtacatgggcacactttcttatgaacaattcaagaaaggtgttcagataccttgtacgtgtggtaaacaagctacaaaatatctagtacaacaggagtcaccttttgttatgatgtcagcaccacctgctcagtatgaacttaagcatggtacatttacttgtgctagtgagtacactggtaattaccagtgtggtcactataagcatataacttctaaggaaactttgtattgcatagacggtgctttacttacaaagtcctcagaatacaaaggtcctattacggatgttttctacaaagaaaacagttacacaacaaccataaaaccagttacttataagttggatggtgttgtttgtacagaaattgaccctaagttggacaattattataagaaggacaactcttatttcacagagcaaccaattgatcttgtaccaaaccaaccatatccaaacgcaagcttcgataattttaagttcgtatgcgataatatcaaatttgctgatgatctcaaccagttaactggttataagaaacctgcttcaagagagcttaaagttacatttttccctgacttaaatggtgatgtggtggctattgattataaacactacacaccctcttttaagaaaggagctaaattgttacataagcctattgtttggcatgttaacaatgcaactaataaagccacgtataaaccaaatacctggtgtatacgttgtctttggagcacaaaaccagttgaaacatcaaattcgtttgatgtactgaagtcagaggacgcgcagggaatggataatcttgcatgtgaagatctaaaaccagtctctgaagaagtagtggaaaatcctaccatacagaaagacgttcttgagtgtaatgtgaaaactaccgaagttgtaggagacattatacttaaaccagcaaataatagtttgaagatcacagaagaggttggccacacagatctaatggctgcttatgtagacaattctagtcttactattaagaaacctaatgaactctctagagtattaggtttgaaaacccttgctactcatggtttagctgctgttaatagtgtcccttgggatactatagctaattatgctaagccttttcttaacaaagttgttagtacaactactaacatagttacacggtgtcttaatcgtgtttgtactaattatatgccttacttctttactttattgctacaattgtgtacttttactagaagtacaaattctagaatcaaggcatctatgccgactactatagcaaagaatactgttaagagtgtcggtaaattttgtctagaggcttcatttaattatctcaagtcacctaacttttctaagctgataaacattatcatctggtttttgctattaagtgtttgcctaggttctttaatctactcaaccgctgctttaggtgttttaatgtctaatttaggcatgccttcttactgtactggttacagagaaggctatttgaactctactaatgtcactattgcaacctactgtactggatctataccttgtagtgtttgtcttagtggtttagattctttagacacctatccttctcttgaaactatacagattaccatttcatctttcaaatgggatttaactgcttttggcttagttgcagagtggtttttggcatatattcttttcactaggtttttctatgtacttggattggctgcaatcatgcaattgtttttcagctattttgcagtccattttattagtaactcttggcttatgtggcttataattaatcttgtgcagatggccccgatttcagctatggttagaatgtacatcttctttgcctcattttattatgtgtggaaaagttatgtgcatgttgtagacggttgtaattcatcaacttgtatgatgtgttacaaacgtaatagagcaacaagagtcgaatgtacaactattgttaatggtgttagaaggtccttttatgtctatgctaatggaggtaaaggcttttgcaaactacacaattggaattgtgttaattgtgatacattctgtgctggtagtacatttattagtgatgaagttgcgagagacttgtcactacagtttaaaagaccaataaatcctactgaccaatcttcttacatcgttgatagtgttacagtgaagaatggttccatccatctttactttgataaagctggtcaaaagacttatgaaagacattctctctctcattttgttaacttagacaacctgagagctaataacactaaaggttcattgcctattaatgttatcgttttcgacggtaaatcaaaatgtgaagaatcatctgcaaaatcagcgtctgtttactacagtcagcttatgtgtcaacctatactgttactagatcaggcattagtgtctgatgttggtgatagtgcggaagttgcagttaaaatgtttgatgcttacgttaatacgttttcatcaacttttaacgtaccaatggaaaaactcaaaacactagttgcaactgcagaagctgaacttgcaaagaatgtgtccttagacaatgtcttatctacgtttatttcagcagctcggcaagggtttgttgattcagatgtagaaactaaagatgttgttgaatgtcttaaattgtcacatcaatctgacatagaagttactggcgatagttgtaataactatatgctcacctataacaaagttgaaaacatgacaccccgtgaccttggtgcttgtattgactgtagtgctagacatattaatgcgcaggtagcaaaaagtcacaacattgctttgatatggaacgttaaagatttcatgtcattgtctgaacaactacgaaaacaaatacgtagtgctgctaaaaagaataacttacccttcaagttgacatgtgcaactactagacaagttgttaatgttgtaacaacaaagatagcacttaagggtggtaaaattgtgaataactggttgaagcagcttattaaagttacacttgtgttcctttttgttgctgctattttctatctgataacacctgttcatgtcatgtctaaacatactgacttttcaagtgaaatcataggatacaaggctattgatggtggtgtcactcgtgacatagcatctacagatacttgttttgctaacaaacatgctgattttgacacatggtttagccagcgtggtggtagttatactaatgacaaagcttgcccattgattgctgcagtcataacaagagaagtgggttttgtcgttcctggtttgcctggaacgatattacgcacaactaatggtgactttttgcatttcttacctagagtttttagtgcagttggtaacatctgttacacaccatcaaaacttatagagtacactgactttgcaacatcagcttgtgttttggctgctgaatgtacaatttttaaagacgcttctggtaagccagtaccatattgttatgataccaatgtactagaaggttctgttgcttatgaaagtttacgccctgacacacgttatgtgctcatggatggctctattattcaatttcctaacacctaccttgaaggttctgtaagagtggtaacaacttttgattctgagtactgtaggcacggcacttgtgaaagatcagaagctggtgtttgtgtatctactagtggtagatgggtacttaacaacgattattacagatctttaccaggagttttctgtggtgtagatgctgtaaatttgcttactaacatgtttacaccactaattcaacctattggtgctttggacatatcagcatctatagtagctggtggtattgtagctatcgtagtaacatgccttgcctactattttatgaggtttagacgtgcttttggtgaatacagtcatgtagttgcctttaatactctcctattccttatgtcattcactgtactctgtttaacaccagtttactcattcttacctggtgtttattctgttatttacctgtacttgacattttatctgactaatgatgtttcttttctcgcacatattcagtggatggttatgttcacacctttagtacctttctggataacaattgcttacatcatttgtatttccacaaagcatttctattggttctttagtaattacctaaagagacgtgtagtctttaatggtgtttcctttagtacttttgaagaagctgcgctgtgcacctttttgttaaataaggagatgtatctaaagttgcgtagtgatgtgctattacctcttacgcaatataatagatacttagctctttataacaagtacaagtatttcagtggagcaatggatacaactagctacagagaagctgcttgttgtcatctcgcaaaggctctcaatgacttcagtaactcaggttctgatgttctttaccaaccaccacaaacctctatcacctcagctgttttgcagagtggttttagaaaaatggcattcccatctggtaaagttgagggttgtatggtacaagtaacttgtggtacaactacacttaacggtctttggcttgatgacgtagtttactgtccaagacatgtgatctgcacctctgaagatatgcttaaccctaattatgaagatctactcatccgtaagtctaatcataacttcttggtacaggctggtaatgttcaactcagggttattggacattctatgcaaaattgtgtacttaagcttaaggttgatacagccaatcctaagacacctaagtataagtttgttcgcattcaaccaggacagactttttcagtgttagcttgttacaatggttcaccatctggtgtttaccaatgtgctatgaggcccaatttcactattaagggttcattccttaatggttcatgtggtagtgttggttttaacatagattatgactgtgtctctttttgttacatgcaccatatggaattaccaactggagttcatgctggcacagacttagaaggtaacttttatggaccttttgttgacaggcaaacagcacaagcagctggtacagatacaactattacagttaatgttcttgcttggttgtacgctgctgttataaatggagacaggtggtttctcaatcgatttaccacaactcttaatgactttaaccttgtggctatgaagtacaattatgaacctctaacacaagaccatgttgacatactaggacctctttctgctcaaactggaattgccgttttagatatgtgtgcttcattaaaagaacttctgcaaaatggtatgaatggacgtaccatattgggtagtgctttattagaagatgagtttacaccttttgatgttgttagacaatgctcaggtgttactttccaaagtgcagtgaaaagaacaatcaagggtacacaccactggttgttactcacaattttgacttcacttttagttttagtccagagtactcaatggtctttgttctttttcttctacgaaaatgcctttttaccttttgctatgggtattattgctatgtctgcttttgcaatgatgtttgtcaaacataagcatgcatttctctgtttgtttttgttaccttctcttgccactgtagcttactttaatatggtctacatgcctgctagttgggtgatgcgtattatgacatggttggatatggttgatactagtttgtctggttttaagctaaaagactgtgttatgtatgcatcagctgtagtgttactaatccttatgacagcaagaactgtgtatgatgatggtgctaggagagtgtggacacttatgaatgtcttgacactcgtttataaagtttactatggcaacgctttagatcaagccatttccatgtgggctcttataatctctgttacttctaactactcaggtgtagttacaactgtcatgtttttggccagaggtattgtttttatgtgtgttgagtattgccctattttcttcataactggtaatacacttcagtgtataatgctagtctattgtttcttaggctatttttgtacttgttacttcggcctcttttgtttactcaaccgctactttagactgactcttggtgtttatgattacttagtgtctacacaggagtttagatatatgaattcacagggactactcccacccaagaatagcatagatgccttcaaactcaacattaaattgttgggtgttggtggcaaaccttgtatcaaagtagccactgtacagtctaaaatgtcagatgtaaagtgcacatcagtagtcttactctcagttttgcaacaactcagagtagaatcatcatctaaattgtgggctcaatgtgtccagttacacaatgacattctcttagctaaagatactactgaagcctttgaaaaaatggtttcactactttctgttttgctttccatgcagggtgctgtagacataaacaagctttgtgaagaaatgctggacaacagggcaaccttacaagctatagcctcagagtttagttcccttccatcatatgcagcttttgctactgctcaagaagcttatgagcaggctgttgctaatggtgattctgaagttgttcttaaaaagttgaagaagtctttgaatgtggctaaatctgaatttgaccgtgatgcagccatgcaacgtaagttggaaaagatggctgatcaagctatgacccaaatgtataaacaggctagatctgaggacaagagggcaaaagttactagtgctatgcagacaatgcttttcactatgcttagaaagttggataatgatgcactcaacaacattatcaacaatgcaagagatggttgtgttcccttgaacataatacctcttacaacagcagccaaactaatggttgtcataccagactacaacacatataagaatacgtgtgatggtacaacatttacttatgcatcagcattgtgggaaatccaacaggttgtagatgcagatagtaaaattgttcagcttagtgaaattagtatggacaattcacctaatttagcatggcctcttattgtaacagctttaagggccaattctgctgtcaaattacagaataatgagcttagtcctgttgcactaagacaaatgtcttgtgctgccggtactacacaaactgcttgcactgatgacaatgcgttagcttactacaacacaacaaagggaggtaggtttgtacttgcactgttatccgatttacaggatttgaaatgggctagattccctaagagtgatggaactggtactatctatacagaactggaaccaccttgtaggtttgttacagacacacctaaaggtcctaaagtgaagtatctttacttcatcaaaggattaaacaacctaaatagaggtatggtacttggtagtttagctgccacagtacgtttacaagctggtaatgcaacagaagttcctgctaattcaactgtactttctttctgtgcttttgctgtagatgctgctaaagcttacaaagattatctagctagtgggggacaaccaatcactaattgtgttaagatgttgtgtacacacactggtactggtcaggcaataacagttacaccggaagccaatatggatcaagaatcctttggtggtgcatcgtgttgtctgtactgccgttgtcatatagatcatccaaatcctaaaggattttgtgacttaaaaggtaagtatgtacaaatacctacaacttgtgctaatgaccctgtgggttttacacttaaaaacacagtctgtaccgtctgcggtatgtggaaaggttatggttgtagttgtgatcaactccgcgaacccatgcttcagtcagctgatgcacaatcgtttttaaac

SEQ ID NO: 59 - DNA, 8088 bp, Artificial Sequence
  SARS-CoV-2 orf1b
cgggtttgcggtgtaagtgcagcccgtcttacaccgtgcggcacaggcactagtactgatgtcgtatatagagcttttgacatctacaatgataaagtagctggttttgctaagttcctaaaaactaattgttgtcgcttccaagaaaaggacgaagatgacaatctcattgattcttactttgtagttaagagacacactttctctaactaccaacatgaagaaacaatttacaacctgcttaaggattgtccagctgttgctaaacatgacttctttaagtttagaatagacggtgacatggtaccacatatatcacgtcaacgtcttactaaatacacaatggcagacctcgtctatgctttaaggcattttgatgaaggtaattgtgacacattaaaagaaatacttgtcacatacaattgttgtgatgatgactacttcaataaaaaggactggtatgattttgtagaaaacccagatatattacgcgtatacgccaacttaggtgaacgtgtacgccaagctttgttaaaaacagtacagttctgtgatgccatgcgaaatgctggtattgttggtgtactgacattagataatcaagatctcaatggtaactggtatgactttggtgatttcatacaaaccacgccaggtagtggagttcctgttgtagactcttattattcattgctcatgcctatattaaccttgaccagggctttaactgcagagtcacatgttgacactgacttaacaaagccttacattaagtgggatttgttaaaatacgacttcacggaagagaggttaaaactctttgaccgttattttaaatactgggatcagacataccacccaaattgtgttaactgtttggatgacagatgcattctgcattgtgcaaactttaatgttctgttctctacagtgttcccacctacaagttttggaccactagtgagaaaaatatttgttgatggtgttccatttgtagtttcaactggataccacttcagagagctaggtgttgtacataatcaggatgtaaacttacatagctctagacttagttttaaggaattacttgtgtatgctgctgatcctgctatgcatgctgcttctggtaatctattactagataaacgcactacgtgcttttcagtagctgcacttactaacaatgttgcttttcaaactgtcaaacccggtaattttaacaaggacttctatgactttgctgtgtctaagggtttctttaaggaaggaagttctgttgaattaaaacacttcttctttgctcaggatggtaatgctgctatcagcgattatgactactatcgttataatctaccaacaatgtgtgatatcagacaactactatttgtagttgaagttgttgataagtactttgattgttacgatggtggctgtattaatgctaaccaagtcatcgtcaacaacctagacaaatcagctggttttccatttaataaatggggtaaggctagactttattatgattccatgagttatgaggatcaagatgcacttttcgcatatacaaaacgtaatgtcatccctactataactcaaatgaaccttaagtatgccattagtgcaaagaatagagctcgcaccgtagctggtgtctctatctgtagtactatgaccaatagacagtttcatcaaaaattactcaagtcaatagccgccactagaggagctactgtagtaattggaacaagcaaattctatggtggttggcacaacatgctcaaaactgtttatagtgatgtagaaaaccctcaccttatgggttgggattatcctaaatgtgatagagccatgcctaacatgcttagaattatggcctcacttgttcttgctcgcaaacatacaacgtgttgtagcttgtcacaccgtttctatagattagctaatgagtgtgctcaagtattgagtgaaatggtcatgtgtggcggttcactatatgttaaaccaggtggaacctcatcaggagatgccacaactgcttatgctaatagtgtgtttaacatttgtcaagctgtcacggccaatgttaatgcacttttatctactgatggtaacaaaattgccgataagtatgtccgcaatttacaacacagactttatgagtgtctctatagaaatagagatgttgacacagactttgtgaatgagttttacgcatatttgcgtaaacatttctcaatgatgatactctctgacgatgctgttgtgtgtttcaatagcacttatgcatctcaaggtctagtggctagcataaagaactttaagtcagttctttactatcaaaacaacgtttttatgtctgaagcaaaatgttggactgagactgaccttactaaaggacctcatgaattttgctctcaacatacaatgctagttaaacagggtgatgattatgtgtaccttccttacccagatccatcaagaatcctaggtgccggttgttttgtagatgatatcgtaaaaacagatggtacacttatgattgaacggttcgtgtctttagctatagatgcttacccacttactaaacatcctaatcaggagtatgctgatgtctttcatttgtacttacaatacatacgtaagctacatgatgagttaacaggacacatgttagacatgtattctgttatgcttactaatgataacacttcaaggtattgggaacctgagttttatgaggctatgtacacaccgcatacagtcttacaagctgttggtgcttgtgttctttgcaattcacagacttcattaagatgtggtgcttgcatacgtagaccattcttatgttgtaaatgctgttacgaccatgtcatctcaacatcacataaattagtcttgtctgttaatccgtatgtttgcaatgctccaggttgtgatgtcacagatgtgactcaactttacttaggaggtatgagctattactgtaagtcacataaaccacccattagttttccattgtgtgctaatggacaagtttttggtctctacaagaatacatgtgttggtagcgataatgttactgactttaatgcaattgcaacatgtgactggacaaatgctggtgattacattttagctaacacctgtactgaaagactcaagctttttgcagcagaaacgctcaaagctactgaggagacatttaaactgtcttatggtattgctactgtacgtgaagtgctgtctgacagagaattacatctttcatgggaagttggtaaacctagaccaccacttaaccgaaattatgtctttactggttatcgtgtaactaaaaacagtaaagtgcaaatcggagagtacacctttgaaaaaggtgactatggtgatgctgttgtttaccgaggtacaacaacttacaaactcaacgttggtgattattttgtgctgacatcacatacagtaatgccattaagtgcacctacactagtgccacaagagcactatgttagaattactggcttatacccaacactcaatatctcagatgagttttctagcaatgttgcaaattatcaaaaggttggtatgcaaaagtattctacactccagggaccacctggtactggtaaaagtcattttgctattggtctagctctctactacccttctgctcgcatagtatatacagcttgctctcatgcagctgttgatgcactatgtgagaaggcattaaaatatttgcccatagacaaatgtagtagaattatacctgcacgtgctcgtgtagagtgttttgataaattcaaggtgaattcaacattagaacagtatgtcttttgtactgtaaatgcattgcctgagacgacagcagatatagttgtctttgatgaaatttcaatggccacaaattatgatttgagtgttgtcaatgccagattacgtgctaagcactatgtgtacattggtgatcctgctcaattacctgcaccacgcacattactaactaagggtacactagaaccagaatatttcaattcagtgtgtagacttatgaaaactataggtccagacatgttcctcggaacttgtcgtagatgtcctgctgaaattgttgacactgtgagtgctttggtttatgataataagcttaaggcacataaagacaaatcagctcaatgctttaaaatgttctacaagggtgttatcacgcatgatgtttcatctgcaattaacaggccacaaataggcgtggtaagagaattccttacacgtaaccctgcttggagaaaagctgtctttatttcaccttacaattcccagaatgctgtagcctcaaagattttgggactaccaactcaaactgttgattcatcacagggctcagaatatgactatgtcatattcactcaaaccactgaaacagctcactcttgtaatgtaaacagattcaacgttgctattaccagagcaaaagtaggcatactttgcataatgtctgatagagacctttatgacaagttgcaatttacaagtcttgaaattccacgtaggaatgtggcaactttacaagctgaaaatgtaacaggactctttaaagattgtagtaaggtaatcactgggttacatcctacacaggcacctacacacttaagtgttgatactaaattcaaaactgaaggtttatgtgttgacatacctggcatacctaaggacatgacctatagaagattaatctctatgatgggtttcaaaatgaattaccaggttaatggttaccctaacatgtttatcacccgcgaagaagctataagacatgtacgtgcatggattggcttcgatgtcgaaggttgtcatgctactagagaagctgttggtaccaatttacctttacagctaggtttttctacaggtgttaacctagttgctgtacctacaggttatgttgatacacctaataatacagatttttccagagttagtgctaaaccaccgcctggagatcaatttaaacacctcataccacttatgtacaaaggacttccttggaatgtagtgcgtataaagattgtccaaatgttaagtgacacacttaaaaatctctctgacagagtcgtatttgtcttatgggcacatggctttgagttgacatctatgaagtattttgtgaagatcggacctgagcgcacatgttgtctatgtgatagacgtgctacatgcttttccactgcttcagacacttatgcctgttggcatcattctattggatttgattacgtctataatccgtttatgattgatgttcaacaatggggttttacaggtaacctacaaagcaaccatgatctgtattgtcaagtccatggtaatgcacatgtagctagttgtgatgcaatcatgactaggtgtctagctgtccacgagtgctttgttaagcgtgttgactggactattgaatatcctataatcggtgatgaactgaagattaatgcggcttgtagaaaggttcaacacatggttgttaaagctgcattattagcagacaaattcccagttcttcacgacattggtaaccctaaagctattaagtgtgtacctcaagctgatgtagaatggaagttctatgatgcacagccttgtagtgacaaagcttacaaaatagaagaactgttctattcttatgccacacattctgacaaattcacagatggtgtatgcctattttggaattgcaatgtcgatagatatcctgctaattccattgtttgtagatttgacactagagtgctatctaaccttaacttgcctggttgtgatggtggcagtttgtatgtaaataagcatgcattccacacaccagcttttgataaaagtgcttttgttaatctaaagcaacttccatttttctattactctgacagtccatgtgagtctcatggaaaacaagtagtgtcagatatagattatgtaccactaaagtctgctacgtgtataacacgttgcaatttaggtggtgctgtctgtagacatcatgctaatgagtacagattgtatctcgatgcttataacatgatgatctcagctggctttagcttgtgggtttacaaacaatttgatacctataacctctggaacacttttacaagacttcagagtttagaaaatgtggcttttaatgttgtaaataagggacactttgatggacaacagggtgaagtaccagtttctatcattaacaacactgtttacacaaaagttgatggtgttgatgtagaattgtttgagaacaaaaccacattacctgttaatgtagcatttgagctttgggctaagcgcaacattaaaccagtaccagaggtgaaaatactcaataatttgggtgtggacattgctgctaatactgtgatctgggactacaaaagagatgctccagcacatatatctactattggtgtttgttctatgactgacatagccaagaaaccaactgaaacgatttgtgcaccactcactgtcttttttgatggtagagttgatggtcaagtagacttatttagaaatgcccgtaatggtgttcttattacagaaggtagtgttaaaggtttacaaccatctgtaggtcccaaacaagctagtcttaatggagtcacattaattggagaagccgtaaaaacacagttcaattattacaagaaagtggatggtgttgtccaacaattacctgaaacttactttactcagagtagaaacttacaggaatttaagcccaggagtcaaatggaaattgatttcttagaacttgctatggatgaattcattgaacggtataaattagaaggctatgccttcgaacatatcgtttatggagattttagtcatagtcagttaggtggtttacatctactgattggactagctaaacgttttaaggaatcaccttttgaacttgaagattttattcctatggacagtacagttaaaaactacttcataacagatgcgcaaacaggttcatctaagtgtgtgtgttctgttattgatcttttacttgatgacttcgttgaaataataaagtcccaagatttatctgtagtttctaaggttgtcaaagtgactattgactatacagaaatctcatttatgctttggtgtaaagatggccatgtagaaacattttacccaaaattacaatctagtcaagcgtggcaaccgggtgttgctatgcctaatctttacaaaatgcaaagaatgctattagaaaagtgtgaccttcaaaattatggtgatagtgcaacattacctaaaggcataatgatgaatgtcgcaaaatatactcaactgtgtcaatatttaaacacactgacattagctgtaccctataatatgagagttatccattttggtgctggttctgataaaggagttgcaccaggtacagctgttttaagacaatggttgcctacaggtacgctgcttgtcgattcagatcttaatgactttgtctctgatgcagattcaactttgattggtgattgtgcaactgtacatacagctaataaatgggatctcattattagtgatatgtacgaccctaagactaagaatgtcacaaaagaaaacgactctaaagagggttttttcacttacatttgtgggtttatacaacaaaagctagctcttggaggttccgtggctataaagataacagaacattcttggaatgctgatctttataagctcatgggacacttcgcatggtggacagcctttgttactaatgtgaatgcgtcatcatctgaagcatttttaatcggatgtaactaccttggcaaaccacgcgaacaaatagatggttatgtcatgcatgcaaattacatattttggaggaatacaaatccaattcagctttcttcttattctttattcgacatgagtaaattcccccttaaattaaggggtactgctgttatgtctttaaaagaaggtcaaatcaatgatatgattctctctcttcttagtaaaggtagacttataattagagaaaacaacagagttgttatttctagtgatgttcttgttaacaactaa
